(19) United States
(12) Patent Application Publication
(10) Pub. No.: US 2008/0301836 A1
(43) Pub. Date: Dec. 4, 2008

(54) Selection of transcription factor variants

(75) Inventors: Karen S. Century, Albany, CA (US); T. Lynne Reuber, San Mateo, CA (US); Katrin Jakob, Alameda, CA (US); Oliver J. Ratcliffe, Oakland, CA (US)

Correspondence Address: Mendel Biotechnology, Inc., 3935 Point Eden Way, Hayward, CA, 94545, US

(73) Assignee: Mendel Biotechnology, Inc., Hayward, CA (US)

(21) Appl. No.: 12/154,154

(22) Filed: May 19, 2008

Related U.S. Application Data
(60) Provisional application No. 60/930,870, filed on May 17, 2007.

(51) Int. Cl. C12N 15/11; A01H 5/00

(52) U.S. Cl. 800/279; 800/278; 800/298

(57) ABSTRACT

The invention relates to a method for selection of modified plant transcription factor polypeptides, polynucleotides that encode them, and methods of producing transgenic plants having advantageous properties, including increased biotic resistance and abiotic stress tolerance, as compared to wild-type or control plants. Without modifications, the transcription factor sequences, when overexpressed in plants, often produce adverse morphological and developmental effects. The disclosed method allows selection of modifications that mitigate these adverse morphological and developmental effects.

[0001] This application claims the benefit of U.S. Provisional Patent Application 60/930,870, filed May 17, 2007 (pending), the entire contents of which are hereby incorporated by reference.

### JOINT RESEARCH AGREEMENT

[0002] The claimed invention, in the field of functional genomics and the characterization of plant genes for the improvement of plants, was made by or on behalf of Mendel Biotechnology, Inc. and Monsanto Company as a result of activities undertaken within the scope of a joint research agreement in effect on or before the date the claimed invention was made.

### FIELD OF THE INVENTION

[0003] The present invention relates to plant genomics and plant improvement.

### BACKGROUND OF THE INVENTION

[0004] Enhanced expression of regulatory proteins such as transcription factors can produce a number of beneficial effects in transgenic plants, including disease resistance, abiotic stress tolerance, improved water use efficiency, improved nutrient use efficiency, faster seed germination, and altered chemical composition. However, overexpression of transcription factors can also cause negative phenotypes, such as reduced plant growth, undesirable alterations in flowering time, and reduced seed yield. One method for reducing such negative side effects is to restrict the spatial or temporal expression of the transcription factor, using a tissue-specific or inducible promoter. However, this strategy is not completely effective in all cases. A second strategy is to engineer the transcription factor protein to alter the range of target genes which it regulates. Alterations in transcription factor proteins can alter either DNA binding specificity or interactions with particular co-factors, and changes in either of these properties can alter the target specificity and therefore the phenotypic effects of transcription factor expression. The present invention provides a method for selecting transcription factor variants that produce desirable stress tolerance phenotypes with reduced negative effects of overexpression. The method is demonstrated with the AP2 domain transcription factors TDR4 and Pti4. These transcription factors produce disease resistance when overexpressed, but produce negative morphological effects such as stunting, delayed flowering, and infertility when constitutively expressed. However, the method can be generalized to other transcription factors from other gene families.

### SUMMARY OF THE INVENTION

[0005] The invention pertains to a method for producing a plant that has greater biotic stress resistance and/or greater abiotic stress tolerance than a control plant, such as a wild-type plant or a non-transformed plant of the same species. The former plant with greater biotic stress resistance or abiotic stress tolerance comprises a mutant form of a transcription factor sequence, and the former plant also has fewer or reduced adverse morphological or developmental effects than a second control plant that constitutively overexpresses the transcription factor sequence. This method is practiced by generating a two-component expression system that comprises two nucleic acid constructs. The first nucleic acid construct, the target construct, encodes a transcription factor polypeptide. The target construct may comprise a LexA operator in front of the transcription factor gene. The second nucleic acid construct, or activator construct, encodes a steroid-binding domain of the glucocorticoid receptor.

[0006] Transgenic plant lines are generated by introducing the two constructs into plants, and transgenic plants are selected that comprise both the target nucleic acid construct and the activator nucleic acid construct are homozygous for both constructs.

[0007] In one embodiment, the target plant is generated by introducing the activator nucleic acid construct into a first plant, a second plant is selected that is homozygous for the activator nucleic acid construct, the second plant is then transformed with the target nucleic acid construct to generate a third plant, and a fourth plant is selected that is homozygous for both the activator and target nucleic acid constructs.

[0008] The transgenic plant lines are mutagenized to produce a pool of mutagenized transgenic plant lines comprising sequence variants of the transcription factor polypeptide. One or more of the mutagenized transgenic plant lines are then selected that have both greater biotic or abiotic stress tolerance than the first control plant that does not overexpress the transcription factor polypeptide. The mutagenized transgenic plant lines also have fewer or reduced adverse morphological or developmental effects as compared to the second control plant that constitutively overexpresses the transcription factor polypeptide.

### BRIEF DESCRIPTION OF THE SEQUENCE LISTING AND FIGURES

[0009] The Sequence Listing provides exemplary polynucleotide and polypeptide sequences of the invention. The traits associated with the use of the sequences are included in the Examples.

[0010] CD-ROMs Copy 1 and Copy 2, and the CRF copy of the Sequence Listing under CFR Section 1.821(e), are read-only memory computer-readable compact discs. Each contains a copy of the Sequence Listing in ASCII text format. The Sequence Listing is named “MBI0081US_ST25.txt”, the electronic file of the Sequence Listing contained on each of these CD-ROMs was created on May 16, 2008, and is 1,924 kilobytes in size. The copies of the Sequence Listing on the CD-ROM discs are hereby incorporated by reference in their entirety.

[0011] FIG. 1 shows a conservative estimate of phylogenetic relationships among the orders of flowering plants (modified from Soltis et al. (1997) Ann. Missouri Bot. Gard. 84: 1-49). Those plants with a single cotyledon (monocots) are a monophyletic clade nested within at least two major lineages of dicots; the eudicots are further divided into rosids and asterids. Arabidopsis is a rosid eudicot classified within the order Brassicales; rice is a member of the monocot order Poales.

[0012] FIG. 1 was adapted from Daly et al. (2001) Plant Physiol. 127: 1328-1333.

[0013] FIG. 2 shows a phylogenic dendogram depicting phylogenetic relationships of higher plant taxa, including clades containing tomato and Arabidopsis; adapted from Ku et al. (2000) Proc. Natl. Acad. Sci. USA 97: 9121-9126; and Chase et al. (1993) Ann. Missouri Bot. Gard. 80: 528-580.

[0014] FIG. 3 shows a two-component system for dexamethasone-inducible expression of a transcription factor. On the left is an activator construct, consisting of a constitutively-expressed chimeric transcriptional activator comprising the LexA DNA binding domain fused to the GAL4 activation domain and the steroid binding domain of the glucocorticoid receptor. This artificial activator is constitutively expressed, but can only enter the nucleus and activate transcription in the presence of dexamethasone. In addition, to test for promoter and activator functioning the activator construct also contains a LexA operator (from plasmid p8op-lacZ; Clontech Laboratories, Inc., Mountain View, Calif.) plus TATA sequence fused to the Green Fluorescent Protein (GFP) gene. On the right is the target construct, consisting of a LexA operator in front of the transcription factor gene (TF gene) of interest. The target construct is transformed into a plant strain carrying the activator construct.

### DETAILED DESCRIPTION

[0015] The present invention relates to polynucleotides and polypeptides for modifying phenotypes of plants, particularly those associated with increased abiotic stress tolerance and increased yield with respect to a control plant (for example, a wild-type plant). Throughout this disclosure, various information sources are referred to and/or are specifically incorporated. The information sources include scientific journal articles, patent documents, textbooks, and World Wide Web browser-inactive page addresses. While the reference to these information sources clearly indicates that they can be used by one of skill in the art, each and every one of the information sources cited herein are specifically incorporated in their entirety, whether or not a specific mention of “incorporation by reference” is noted. The contents and teachings of each and every one of the information sources can be relied on and used to make and use embodiments of the invention.

[0016] As used herein and in the appended claims, the singular forms “a”, “an”, and “the” include the plural reference unless the context clearly dictates otherwise. Thus, for example, a reference to “a host cell” includes a plurality of such host cells, and a reference to “a stress” is a reference to one or more stresses and equivalents thereof known to those skilled in the art, and so forth.

### Definitions

[0017] “Polynucleotide” is a nucleic acid molecule comprising a plurality of polymerized nucleotides, e.g., at least about 15 consecutive polymerized nucleotides. A polynucleotide may be a nucleic acid, oligonucleotide, nucleotide, or any fragment thereof. In many instances, a polynucleotide comprises a nucleotide sequence encoding a polypeptide (or protein) or a domain or fragment thereof. Additionally, the polynucleotide may comprise a promoter, an intron, an enhancer region, a polyadenylation site, a translation initiation site, 5′ or 3′ untranslated regions, a reporter gene, a selectable marker, or the like. The polynucleotide can be single-stranded or double-stranded DNA or RNA. The polynucleotide optionally comprises modified bases or a modified backbone. The polynucleotide can be, e.g., genomic DNA or RNA, a transcript (such as an mRNA), a cDNA, a PCR product, a cloned DNA, a synthetic DNA or RNA, or the like. The polynucleotide can be combined with carbohydrate, lipids, protein, or other materials to perform a particular activity such as transformation or form a useful composition such as a peptide nucleic acid (PNA). The polynucleotide can comprise a sequence in either sense or antisense orientations. “Oligonucleotide” is substantially equivalent to the terms amplimer, primer, oligomer, element, target, and probe and is preferably single-stranded.

[0018] A “recombinant polynucleotide” is a polynucleotide that is not in its native state, e.g., the polynucleotide comprises a nucleotide sequence not found in nature, or the polynucleotide is in a context other than that in which it is naturally found, e.g., separated from nucleotide sequences with which it typically is in proximity in nature, or adjacent (or contiguous with) nucleotide sequences with which it typically is not in proximity. For example, the sequence at issue can be cloned into a vector, or otherwise recombined with one or more additional nucleic acid.

[0019] An “isolated polynucleotide” is a polynucleotide, whether naturally occurring or recombinant, that is present outside the cell in which it is typically found in nature, whether purified or not. Optionally, an isolated polynucleotide is subject to one or more enrichment or purification procedures, e.g., cell lysis, extraction, centrifugation, precipitation, or the like.

[0020] “Gene” or “gene sequence” refers to the partial or complete coding sequence of a gene, its complement, and its 5′ or 3′ untranslated regions. A gene is also a functional unit of inheritance, and in physical terms is a particular segment or sequence of nucleotides along a molecule of DNA (or RNA, in the case of RNA viruses) involved in producing a polypeptide chain. The latter may be subjected to subsequent processing such as chemical modification or folding to obtain a functional protein or polypeptide. A gene may be isolated, partially isolated, or found with an organism's genome. By way of example, a transcription factor gene encodes a transcription factor polypeptide, which may be functional or require processing to function as an initiator of transcription.

[0021] Operationally, genes may be defined by the cis-trans test, a genetic test that determines whether two mutations occur in the same gene and that may be used to determine the limits of the genetically active unit (Rieger et al. (1976) Glossary of Genetics and Cytogenetics: Classical and Molecular, 4th ed., Springer Verlag, Berlin). A gene generally includes regions preceding (“leaders”; upstream) and following (“trailers”; downstream) the coding region. A gene may also include intervening, non-coding sequences, referred to as “introns”, located between individual coding segments, referred to as “exons”. Most genes have an associated promoter region, a regulatory sequence 5′ of the transcription initiation codon (there are some genes that do not have an identifiable promoter). The function of a gene may also be regulated by enhancers, operators, and other regulatory elements.

[0022] A “polypeptide” is an amino acid sequence comprising a plurality of consecutive polymerized amino acid residues e.g., at least about 15 consecutive polymerized amino acid residues. In many instances, a polypeptide comprises a polymerized amino acid residue sequence that is a transcription factor or a domain or portion or fragment thereof. Additionally, the polypeptide may comprise: (i) a localization domain; (ii) an activation domain; (iii) a repression domain; (iv) an oligomerization domain; (v) a protein-protein interaction domain; (vi) a DNA-binding domain; or the like. The polypeptide optionally comprises modified amino acid residues, naturally occurring amino acid residues not encoded by a codon, non-naturally occurring amino acid residues.

[0023] “Protein” refers to an amino acid sequence, oligopeptide, peptide, polypeptide or portions thereof whether naturally occurring or synthetic.

[0024] A “recombinant polypeptide” is a polypeptide produced by translation of a recombinant polynucleotide. A “synthetic polypeptide” is a polypeptide created by consecutive polymerization of isolated amino acid residues using methods well known in the art. An “isolated polypeptide,” whether a naturally occurring or a recombinant polypeptide, is more enriched in (or out of) a cell than the polypeptide in its natural state in a wild-type cell, e.g., more than about 5% enriched, more than about 10% enriched, or more than about 20%, or more than about 50%, or more, enriched, i.e., alternatively denoted: 105%, 110%, 120%, 150% or more, enriched relative to wild type standardized at 100%. Such an enrichment is not the result of a natural response of a wild-type plant. Alternatively, or additionally, the isolated polypeptide is separated from other cellular components with which it is typically associated, e.g., by any of the various protein purification methods herein.

[0025] “Homology” refers to sequence similarity between a reference sequence and at least a fragment of a newly sequenced clone insert or its encoded amino acid sequence.

[0026] “Identity” or “similarity” refers to sequence similarity between two polynucleotide sequences or between two polypeptide sequences, with identity being a more strict comparison. The phrases “percent identity” and “% identity” refer to the percentage of sequence similarity found in a comparison of two or more polynucleotide sequences or two or more polypeptide sequences. “Sequence similarity” refers to the percent similarity in base pair sequence (as determined by any suitable method) between two or more polynucleotide sequences. Two or more sequences can be anywhere from 0-100% similar, or any integer value therebetween. Identity or similarity can be determined by comparing a position in each sequence that may be aligned for purposes of comparison. When a position in the compared sequence is occupied by the same nucleotide base or amino acid, then the molecules are identical at that position. A degree of similarity or identity between polynucleotide sequences is a function of the number of identical, matching or corresponding nucleotides at positions shared by the polynucleotide sequences. A degree of identity of polypeptide sequences is a function of the number of identical amino acids at corresponding positions shared by the polypeptide sequences. A degree of homology or similarity of polypeptide sequences is a function of the number of amino acids at corresponding positions shared by the polypeptide sequences.

[0027] A transcription factor that may be used mutagenized used to produce transformed plants with increased resistance to biotic stress or increased tolerance to biotic stress will have a minimum percentage identity to the listed polypeptide sequences. Functional transcription factors of the invention may exhibit a degree of sequence homology such as at least about 56% sequence identity, or at least about 58% sequence identity, or at least about 60% sequence identity, or at least about 65%, or at least about 67%, or at least about 70%, or at least about 71%, or at least about 72%, or at least about 73%, or at least about 74%, or at least about 75%, or at least about 76%, or at least about 77%, or at least about 78%, or at least about 79%, or at least about 80%, or at least about 81%, or at least about 82%, or at least about 83%, or at least about 84%, or at least about 85%, or at least about 86%, or at least about 87%, or at least about 88%, or at least about 89%, or at least about 90%, or at least about 91%, or at least about 92%, or at least about 93%, or at least about 94%, or at least about 95%, or at least about 96%, or at least about 97%, or at least about 98%, or at least about 99% amino acid residue sequence identity, to a polypeptide provided in the Sequence Listing, e.g., SEQ ID NOs: 2, 4, or sequences that are orthologous to SEQ ID NOs: 2 or 4, or SEQ ID NO: 12, 14, 16, 18, 20, 22, 24, 26, 28, 30, 32, 34, 36, 38 or 40, or 41-72, or 74, 76, 78, 80, 82, 84, 86, 88, 90, 92, 94, or 96, or any of SEQ ID NO: 2n−1, where n=56-487.

[0028] “Alignment” refers to a number of nucleotide bases or amino acid residue sequences aligned by lengthwise comparison so that components in common (i.e., nucleotide bases or amino acid residues at corresponding positions) may be visually and readily identified. The fraction or percentage of components in common is related to the homology or identity between the sequences. An alignment may suitably be determined by means of computer programs known in the art, such as MACVECTOR software (1999) (Acceirys, Inc., San Diego, Calif.).

[0029] A “conserved domain” or “conserved region” as used herein refers to a region in heterologous polynucleotide or polypeptide sequences where there is a relatively high degree of sequence identity between the distinct sequences. An AP2 domain, or “B-box zinc finger” domain”, such as is found in a polypeptide member of AP2 and B-box zinc finger families, respectively, are examples of conserved domains. With respect to polynucleotides encoding presently disclosed polypeptides, a conserved domain is preferably at least nine base pairs (bp) in length. A conserved domain with respect to presently disclosed polypeptides refers to a domain within a polypeptide family that exhibits a higher degree of sequence homology, such as at least about 56% sequence identity, or at least about 58% sequence identity, or at least about 60% sequence identity, or at least about 65%, or at least about 67%, or at least about 70%, or at least about 71%, or at least about 72%, or at least about 73%, or at least about 74%, or at least about 75%, or at least about 76%, or at least about 77%, or at least about 78%, or at least about 79%, or at least about 80%, or at least about 81%, or at least about 82%, or at least about 83%, or at least about 84%, or at least about 85%, or at least about 86%, or at least about 87%, or at least about 88%, or at least about 89%, or at least about 90%, or at least about 91%, or at least about 92%, or at least about 93%, or at least about 94%, or at least about 95%, or at least about 96%, or at least about 97%, or at least about 98%, or at least about 99% amino acid residue sequence identity, to a conserved domain of a polypeptide of the invention (e.g., SEQ ID NOs: 2, 4, or sequences that are orthologous to SEQ ID NOs: 2 or 4, or any of SEQ ID NO: 2n−1, where n=56-487). Sequences that possess or encode for conserved domains that meet these criteria of percentage identity, and that have comparable biological activity to the present polypeptide sequences, for example, as members of the same clade polypeptides, such as sequences closely related to TDR4, SEQ ID NO: 2 or Pti4, SEQ ID NO: 4 are encompassed by the invention. A fragment or domain can be referred to as outside a conserved domain, outside a consensus sequence, or outside a consensus DNA-binding site that is known to exist or that exists for a particular polypeptide class, family, or sub-family. In this case, the fragment or domain will not include the exact amino acids of a consensus sequence or consensus DNA-binding site of a transcription factor class, family or sub-family, or the exact amino acids of a particular transcription factor consensus sequence or consensus DNA-binding site. Furthermore, a particular fragment, region, or domain of a polypeptide, or a polynucleotide encoding a polypeptide, can be “outside a conserved domain” if all the amino acids of the fragment, region, or domain fall outside of a defined conserved domain(s) for a polypeptide or protein. Sequences having lesser degrees of identity but comparable biological activity are considered to be equivalents.

[0030] As one of ordinary skill in the art recognizes, conserved domains may be identified as regions or domains of identity to a specific consensus sequence (see, for example, Riechmann et al. (Riechmann et al. (2000a) Science 290, 2105-2110, and Riechmann and Ratcliffe (2000b) Curr. Opin. Plant Biol. 3, 423-434). Thus, by using alignment methods well known in the art, the conserved domains of the plant polypeptides, for example, for the AP2 family of transcription factors, or the B-box zinc finger proteins (Putterill et al. (1995) Cell 80: 847-857), may be determined.

[0031] The conserved domains for many of the polypeptide sequences of the invention are listed in Tables 1 and 2. Also, the polypeptides of Tables 1 and 2 have conserved domains specifically indicated by amino acid coordinate start and stop sites. A comparison of the regions of these polypeptides allows one of skill in the art (see, for example, Reeves and Nissen (1990) J. Biol. Chem. 265, 8573-8582) to identify domains or conserved domains for any of the polypeptides listed or referred to in this disclosure.

[0032] “Complementary” refers to the natural hydrogen bonding by base pairing between purines and pyrimidines. For example, the sequence A-C-G-T (5′->3′) forms hydrogen bonds with its complements A-C-G-T (5′->3′) or A-C-G-U (5′->3′). Two single-stranded molecules may be considered partially complementary, if only some of the nucleotides bond, or “completely complementary” if all of the nucleotides bond. The degree of complementarity between nucleic acid strands affects the efficiency and strength of hybridization and amplification reactions. “Fully complementary” refers to the case where bonding occurs between every base pair and its complement in a pair of sequences, and the two sequences have the same number of nucleotides.

[0033] The terms “highly stringent” or “highly stringent condition” refer to conditions that permit hybridization of DNA strands whose sequences are highly complementary, wherein these same conditions exclude hybridization of significantly mismatched DNAs. Polynucleotide sequences capable of hybridizing under stringent conditions with the polynucleotides of the present invention may be, for example, variants of the disclosed polynucleotide sequences, including allelic or splice variants, or sequences that encode orthologs or paralogs of presently disclosed polypeptides. Nucleic acid hybridization methods are disclosed in detail by Kashima et al. (1985) Nature 313: 402-404, Sambrook et al. (1989) Molecular Cloning: A Laboratory Manual, 2nd Ed., Cold Spring Harbor Laboratory, Cold Spring Harbor, N.Y., and by Haymes et al. (1985) Nucleic Acid Hybridization: A Practical Approach, IRL Press, Washington, D.C., which references are incorporated herein by reference.

[0034] In general, stringency is determined by the temperature, ionic strength, and concentration of denaturing agents (e.g., formamide) used in a hybridization and washing procedure (for a more detailed description of establishing and determining stringency, see the section “Identifying Polynucleotides or Nucleic Acids by Hybridization”, below). The degree to which two nucleic acids hybridize under various conditions of stringency is correlated with the extent of their similarity. Thus, similar nucleic acid sequences from a variety of sources, such as within a plant's genome (as in the case of paralogs) or from another plant (as in the case of orthologs) that may perform similar functions can be isolated on the basis of their ability to hybridize with known related polynucleotide sequences. Numerous variations are possible in the conditions and means by which nucleic acid hybridization can be performed to isolate related polynucleotide sequences having similarity to sequences known in the art and are not limited to those explicitly disclosed herein. Such an approach may be used to isolate polynucleotide sequences having various degrees of similarity with disclosed polynucleotide sequences, such as, for example, encoded transcription factors having 56% or greater identity with the conserved domain of disclosed sequences.

[0035] The invention also pertains to a nucleic acid construct, or a transformed plant comprising such a construct, where the construct comprises a nucleic acid sequence found in the Sequence Listing, or a sequence that is homologous to any of these sequences and that functions in a similar manner, or a sequence that hybridizes to any of these sequences under stringent conditions. Stingent conditions may comprise at least 6×SSC and 1% SDS at 65° C., with a first wash for 10 minutes at about 42° C. with about 20% (v/v) formamide in 0.1×SSC, and with a subsequent wash with 0.2×SSC and 0.1% SDS at 65° C. It is known in the art that hybridization techniques using a known nucleic acid as a probe under highly stringent conditions will identify structurally similar nucleic acids.

[0036] The terms “paralog” and “ortholog” are defined below in the section entitled “Orthologs and Paralogs”. In brief, orthologs and paralogs are evolutionarily related genes that have similar sequences and functions. Orthologs are structurally related genes in different species that are derived by a speciation event. Paralogs are structurally related genes within a single species that are derived by a duplication event.

[0037] In general, the term “variant” refers to molecules with some differences, generated synthetically or naturally, in their base or amino acid sequences as compared to a reference (native) polynucleotide or polypeptide, respectively. These differences include substitutions, insertions, deletions or any desired combinations of such changes in a native polynucleotide of amino acid sequence.

[0038] With regard to polynucleotide variants, differences between presently disclosed polynucleotides and polynucleotide variants are limited so that the nucleotide sequences of the former and the latter are closely similar overall and, in many regions, identical. Variant nucleotide sequences may encode different amino acid sequences, in which case such nucleotide differences will result in amino acid substitutions, additions, deletions, insertions, truncations or fusions with respect to the similar disclosed polynucleotide sequences. These variations may result in polynucleotide variants encoding polypeptides that share at least one functional characteristic. The degeneracy of the genetic code also dictates that many different variant polynucleotides can encode identical and/or substantially similar polypeptides in addition to those sequences illustrated in the Sequence Listing.

[0039] Also within the scope of the invention is a variant of a nucleic acid listed in the Sequence Listing, that is, one having a sequence that differs from the one of the polynucleotide sequences in the Sequence Listing, or a complementary sequence, that encodes a functionally equivalent polypeptide (i.e., a polypeptide having some degree of equivalent or similar biological activity) but differs in sequence from the sequence in the Sequence Listing, due to degeneracy in the genetic code. Included within this definition are polymorphisms that may or may not be readily detectable using a particular oligonucleotide probe of the polynucleotide encoding polypeptide, and improper or unexpected hybridization to allelic variants, with a locus other than the normal chromosomal locus for the polynucleotide sequence encoding polypeptide.

[0040] “Allelic variant” or “polynucleotide allelic variant” refers to any of two or more alternative forms of a gene occupying the same chromosomal locus. Allelic variation arises naturally through mutation, and may result in phenotypic polymorphism within populations. Gene mutations may be “silent” or may encode polypeptides having altered amino acid sequence. “Allelic variant” and “polypeptide allelic variant” may also be used with respect to polypeptides, and in this case the terms refer to a polypeptide encoded by an allelic variant of a gene.

[0041] “Splice variant” or “polynucleotide splice variant” as used herein refers to alternative forms of RNA transcribed from a gene. Splice variation naturally occurs as a result of alternative sites being spliced within a single transcribed RNA molecule or between separately transcribed RNA molecules, and may result in several different forms of mRNA transcribed from the same gene. Thus, splice variants may encode polypeptides having different amino acid sequences, which may or may not have similar functions in the organism. “Splice variant” or “polypeptide splice variant” may also refer to a polypeptide encoded by a splice variant of a transcribed mRNA.

[0042] As used herein, “polynucleotide variants” may also refer to polynucleotide sequences that encode paralogs and orthologs of the presently disclosed polypeptide sequences. “Polypeptide variants” may refer to polypeptide sequences that are paralogs and orthologs of the presently disclosed polypeptide sequences.

[0043] Differences between presently disclosed polypeptides and polypeptide variants are limited so that the sequences of the former and the latter are closely similar overall and, in many regions, identical. Presently disclosed polypeptide sequences and similar polypeptide variants may differ in amino acid sequence by one or more substitutions, additions, deletions, fusions and truncations, which may be present in any combination. These differences may produce silent changes and result in a functionally equivalent polypeptides. Thus, it will be readily appreciated by those of skill in the art, that any of a variety of polynucleotide sequences is capable of encoding the polypeptides and homolog polypeptides of the invention. A polypeptide sequence variant may have “conservative” changes, wherein a substituted amino acid has similar structural or chemical properties. Deliberate amino acid substitutions may thus be made on the basis of similarity in polarity, charge, solubility, hydrophobicity, hydrophilicity, and/or the amphipathic nature of the residues, as long as a significant amount of the functional or biological activity of the polypeptide is retained. For example, negatively charged amino acids may include aspartic acid and glutamic acid, positively charged amino acids may include lysine and arginine, and amino acids with uncharged polar head groups having similar hydrophilicity values may include leucine, isoleucine, and valine; glycine and alanine; asparagine and glutamine; serine and threonine; and phenylalanine and tyrosine. More rarely, a variant may have “non-conservative” changes, e.g., replacement of a glycine with a tryptophan. Similar minor variations may also include amino acid deletions or insertions, or both. Related polypeptides may comprise, for example, additions and/or deletions of one or more N-linked or O-linked glycosylation sites, or an addition and/or a deletion of one or more cysteine residues. Guidance in determining which and how many amino acid residues may be substituted, inserted or deleted without abolishing functional or biological activity may be found using computer programs well known in the art, for example, DNASTAR software (see U.S. Pat. No. 5,840,544). Amino acid substitutions outside of the identified functional conserved domains are unlikely to greatly affect regulatory activity of the present transcription factors.

[0044] “Fragment”, with respect to a polynucleotide, refers to a clone or any part of a polynucleotide molecule that retains a usable, functional characteristic. Useful fragments include oligonucleotides and polynucleotides that may be used in hybridization or amplification technologies or in the regulation of replication, transcription or translation. A “polynucleotide fragment” refers to any subsequence of a polynucleotide, typically, of at least about 9 consecutive nucleotides, preferably at least about 30 nucleotides, more preferably at least about 50 nucleotides, of any of the sequences provided herein. Exemplary polynucleotide fragments are the first sixty consecutive nucleotides of the polynucleotides listed in the Sequence Listing. Exemplary fragments also include fragments that comprise a region that encodes an conserved domain of a polypeptide. Exemplary fragments also include fragments that comprise a conserved domain of a polypeptide. Exemplary fragments include fragments that comprise an conserved domain of a polypeptide such as a domain associated with a function of the polypeptide (e.g., a domain that binds to a DNA promoter region, an activation domain, or a domain for protein-protein interactions, etc.).

[0045] Fragments may also include subsequences of polypeptides and protein molecules, or a subsequence of the polypeptide. Fragments may have uses in that they may have antigenic potential. In some cases, the fragment or domain is a subsequence of the polypeptide which performs at least one biological function of the intact polypeptide in substantially the same manner, or to a similar extent, as does the intact polypeptide. For example, a polypeptide fragment can comprise a recognizable structural motif or functional domain such as a DNA-binding site or domain that binds to a DNA promoter region, an activation domain, or a domain for protein-protein interactions, and may initiate transcription. Fragments can vary in size from as few as 3 amino acid residues to the full length of the intact polypeptide, but are preferably at least about 30 amino acid residues in length and more preferably at least about 60 amino acid residues in length.

[0046] The invention also encompasses production of DNA sequences that encode polypeptides and derivatives, or fragments thereof, entirely by synthetic chemistry. After production, the synthetic sequence may be inserted into any of the many available expression vectors and cell systems using reagents well known in the art. Moreover, synthetic chemistry may be used to introduce mutations into a sequence encoding polypeptides or any fragment thereof.

[0047] The term “plant” includes whole plants, shoot vegetative organs/structures (for example, leaves, stems and tubers), roots, flowers and floral organs/structures (for example, bracts, sepals, petals, stamens, carpels, anthers and ovules), seed (including embryo, endosperm, and seed coat) and fruit (the mature ovary), plant tissue (for example, vascular tissue, ground tissue, and the like) and cells (for example, guard cells, egg cells, and the like), and progeny of same. The class of plants that can be used in the method of the invention is generally as broad as the class of higher and lower plants amenable to transformation techniques, including angiosperms (monocotyledonous and dicotyledonous plants), gymnosperms, ferns, horsetails, psilophytes, lycophytes, bryophytes, and multicellular algae (see for example, FIG. 1, adapted from Daly et al. (2001) supra, FIG. 2, adapted from Ku et al. (2000) supra; and see also Tudge (2000) in The Variety of Life, Oxford University Press, New York, N.Y. pp. 547-606.

[0048] A “control plant” as used in the present invention refers to a plant cell, seed, plant component, plant tissue, plant organ or whole plant used to compare against transgenic or genetically modified plant for the purpose of identifying an enhanced phenotype in the transgenic or genetically modified plant. A control plant may in some cases be a transgenic plant line that comprises an empty vector or marker gene, but does not contain the recombinant polynucleotide of the present invention that is expressed in the transgenic or genetically modified plant being evaluated. In general, a control plant is a plant of the same line or variety as the transgenic or genetically modified plant being tested. A suitable control plant would include a genetically unaltered or non-transgenic plant of the parental line used to generate a transgenic plant herein.

[0049] A “transgenic plant” refers to a plant that contains genetic material not found in a wild-type plant of the same species, variety or cultivar. The genetic material may include a transgene, an insertional mutagenesis event (such as by transposon or T-DNA insertional mutagenesis), an activation tagging sequence, a mutated sequence, a homologous recombination event or a sequence modified by chimeraplasty. Typically, the foreign genetic material has been introduced into the plant by human manipulation, but any method can be used as one of skill in the art recognizes.

[0050] A transgenic plant may contain an expression vector or cassette. The expression cassette typically comprises a polypeptide-encoding sequence operably linked (i.e., under regulatory control of) to appropriate inducible or constitutive regulatory sequences that allow for the controlled expression of polypeptide. The expression cassette can be introduced into a plant by transformation or by breeding after transformation of a parent plant. A plant refers to a whole plant as well as to a plant part, such as seed, fruit, leaf, or root, plant tissue, plant cells or any other plant material, e.g., a plant explant, as well as to progeny thereof, and to in vitro systems that mimic biochemical or cellular components or processes in a cell.

[0051] “Wild type” or “wild-type”, as used herein, refers to a plant cell, seed, plant component, plant tissue, plant organ or whole plant that has not been genetically modified or treated in an experimental sense. Wild-type cells, seed, components, tissue, organs or whole plants may be used as controls to compare levels of expression and the extent and nature of trait modification with cells, tissue or plants of the same species in which a polypeptide's expression is altered, e.g., in that it has been knocked out, overexpressed, or ectopically expressed.

[0052] A “trait” refers to a physiological, morphological, biochemical, or physical characteristic of a plant or particular plant material or cell. In some instances, this characteristic is visible to the human eye, such as seed or plant size, or can be measured by biochemical techniques, such as detecting the protein, starch, or oil content of seed or leaves, or by observation of a metabolic or physiological process, e.g. by measuring tolerance to water deprivation or particular salt or sugar concentrations, or by the observation of the expression level of a gene or genes, e.g., by employing Northern analysis, RT-PCR, microarray gene expression assays, or reporter gene expression systems, or by agricultural observations such as hyperosmotic stress tolerance or yield. Any technique can be used to measure the amount of, comparative level of, or difference in any selected chemical compound or macromolecule in the transgenic plants, however.

[0053] “Trait modification” refers to a detectable difference in a characteristic in a plant ectopically expressing a polynucleotide or polypeptide of the present invention relative to a plant not doing so, such as a wild-type plant. In some cases, the trait modification can be evaluated quantitatively. For example, the trait modification can entail at least about a 2% increase or decrease, or an even greater difference, in an observed trait as compared with a control or wild-type plant. It is known that there can be a natural variation in the modified trait. Therefore, the trait modification observed entails a change of the normal distribution and magnitude of the trait in the plants as compared to control or wild-type plants.

[0054] When two or more plants have “similar morphologies”, “substantially similar morphologies”, “a morphology that is substantially similar”, or are “morphologically similar”, the plants have comparable forms or appearances, including analogous features such as overall dimensions, height, width, mass, root mass, shape, glossiness, color, stem diameter, leaf size, leaf dimension, leaf density, internode distance, branching, root branching, number and form of inflorescences, and other macroscopic characteristics, and the individual plants are not readily distinguishable based on morphological characteristics alone.

[0055] “Modulates” refers to a change in activity (biological, chemical, or immunological) or lifespan resulting from specific binding between a molecule and either a nucleic acid molecule or a protein.

[0056] The term “transcript profile” refers to the expression levels of a set of genes in a cell in a particular state, particularly by comparison with the expression levels of that same set of genes in a cell of the same type in a reference state. For example, the transcript profile of a particular polypeptide in a suspension cell is the expression levels of a set of genes in a cell knocking out or overexpressing that polypeptide compared with the expression levels of that same set of genes in a suspension cell that has normal levels of that polypeptide. The transcript profile can be presented as a list of those genes whose expression level is significantly different between the two treatments, and the difference ratios. Differences and similarities between expression levels may also be evaluated and calculated using statistical and clustering methods.

[0057] “Ectopic expression or altered expression” in reference to a polynucleotide indicates that the pattern of expression in, e.g., a transgenic plant or plant tissue, is different from the expression pattern in a wild-type plant or a reference plant of the same species. The pattern of expression may also be compared with a reference expression pattern in a wild-type plant of the same species. For example, the polynucleotide or polypeptide is expressed in a cell or tissue type other than a cell or tissue type in which the sequence is expressed in the wild-type plant, or by expression at a time other than at the time the sequence is expressed in the wild-type plant, or by a response to different inducible agents, such as hormones or environmental signals, or at different expression levels (either higher or lower) compared with those found in a wild-type plant. The term also refers to altered expression patterns that are produced by lowering the levels of expression to below the detection level or completely abolishing expression. The resulting expression pattern can be transient or stable, constitutive or inducible. In reference to a polypeptide, the term “ectopic expression or altered expression” further may relate to altered activity levels resulting from the interactions of the polypeptides with exogenous or endogenous modulators or from interactions with factors or as a result of the chemical modification of the polypeptides.

[0058] The term “overexpression” as used herein refers to a greater expression level of a gene in a plant, plant cell or plant tissue, compared to expression in a wild-type plant, cell or tissue, at any developmental or temporal stage for the gene. Overexpression can occur when, for example, the genes encoding one or more polypeptides are under the control of a strong promoter (e.g., the cauliflower mosaic virus 35S transcription initiation region). Overexpression may also under the control of an inducible or tissue specific promoter. Thus, overexpression may occur throughout a plant, in specific tissues of the plant, or in the presence or absence of particular environmental signals, depending on the promoter used.

[0059] Overexpression may take place in plant cells normally lacking expression of polypeptides functionally equivalent or identical to the present polypeptides. Overexpression may also occur in plant cells where endogenous expression of the present polypeptides or functionally equivalent molecules normally occurs, but such normal expression is at a lower level. Overexpression thus results in a greater than normal production, or “overproduction” of the polypeptide in the plant, cell or tissue.

[0060] The term “transcription regulating region” refers to a DNA regulatory sequence that regulates expression of one or more genes in a plant when a transcription factor having one or more specific binding domains binds to the DNA regulatory sequence. Transcription factors possess an conserved domain. The transcription factors also comprise an amino acid subsequence that forms a transcription activation domain that regulates expression of one or more abiotic stress tolerance genes in a plant when the transcription factor binds to the regulating region.

[0061] “Yield” or “plant yield” refers to increased plant growth, increased crop growth, increased biomass, and/or increased plant product production, and is dependent to some extent on temperature, plant size, organ size, planting density, light, water and nutrient availability, and how the plant copes with various stresses, such as through temperature acclimation and water or nutrient use efficiency.

[0062] “Planting density” refers to the number of plants that can be grown per acre. For crop species, planting or population density varies from a crop to a crop, from one growing region to another, and from year to year. Using corn as an example, the average prevailing density in 2000 was in the range of 20,000-25,000 plants per acre in Missouri, USA. A desirable higher population density (a measure of yield) would be at least 22,000 plants per acre, and a more desirable higher population density would be at least 28,000 plants per acre, more preferably at least 34,000 plants per acre, and most preferably at least 40,000 plants per acre. The average prevailing densities per acre of a few other examples of crop plants in the USA in the year 2000 were: wheat 1,000,000-1,500,000; rice 650,000-900,000; soybean 150,000-200,000, canola 260,000-350,000, sunflower 17,000-23,000 and cotton 28,000-55,000 plants per acre (Cheikh et al. (2003) U.S. Patent Application No. 20030101479). A desirable higher population density for each of these examples, as well as other valuable species of plants, would be at least 10% higher than the average prevailing density or yield.

[0063] Regarding the terms “biotrophs” and “necrotrophs”, plant pathogens fall into these two major classes (reviewed in Oliver and Ipcho (2004) Mol. Plant. Pathol. 5, 347-352). Biotrophic pathogens obtain energy by parasitizing living plant tissue, while necrotrophs obtain energy from dead plant tissue. Examples of biotrophs include the powdery mildews, rusts, and downy mildews; these pathogens can only grow in association with living plant tissue, and parasitize plants through intracellular feeding structures called haustoria. Examples of necrotrophs include Sclerotinia sclerotiorum (white mold), Botrytis cinerea (grey mold), and Cochliobolus heterostrophus (Southern corn leaf blight). The general pathogenic strategy of necrotrophs is to kill plant tissue through toxins and lytic enzymes, and live off the released nutrients. Pathologists also recognize a third class of pathogens, called hemibiotrophs: these pathogens have an initial biotrophic stage, followed by a necrotrophic stage once a parasitic association with plant cells has been established. In general, different defense responses have been found to be induced in plants in response to attack by a biotrophic or necrotrophic pathogen. Infection by biotrophic pathogens often induces defense responses mediated by the plant hormone salicylic acid, while attack by a necrotrophic pathogen often induces defense responses mediated by coordinated action of the hormones ethylene and jasmonate.

### DESCRIPTION OF THE SPECIFIC EMBODIMENTS

### Transcription Factors Modify Expression of Endogenous Genes

[0064] A transcription factor may include, but is not limited to, any polypeptide that can activate or repress transcription of a single gene or a number of genes. As one of ordinary skill in the art recognizes, transcription factors can be identified by the presence of a region or domain of structural similarity or identity to a specific consensus sequence or the presence of a specific consensus DNA-binding motif (see, for example, Riechmann et al. (2000a) supra). The plant transcription factors of the present invention belong to various transcription factor families, such as the AP2 transcription factor family and include putative transcription factors.

[0065] Generally, transcription factors are involved in cell differentiation and proliferation and the regulation of growth. Accordingly, one skilled in the art would recognize that by expressing the present sequences in a plant, one may change the expression of autologous genes or induce the expression of introduced genes. By affecting the expression of similar autologous sequences in a plant that have the biological activity of the present sequences, or by introducing the present sequences into a plant, one may alter a plant's phenotype to one with improved traits related to osmotic stresses. The sequences of the invention may also be used to transform a plant and introduce desirable traits not found in the wild-type cultivar or strain. Plants may then be selected for those that produce the most desirable degree of over- or under-expression of target genes of interest and coincident trait improvement.

[0066] The sequences of the present invention may be from any species, particularly plant species, in a naturally occurring form or from any source whether natural, synthetic, semi-synthetic or recombinant. The sequences of the invention may also include fragments of the present amino acid sequences. Where “amino acid sequence” is recited to refer to an amino acid sequence of a naturally occurring protein molecule, “amino acid sequence” and like terms are not meant to limit the amino acid sequence to the complete native amino acid sequence associated with the recited protein molecule.

[0067] In addition to methods for modifying a plant phenotype by employing one or more polynucleotides and polypeptides of the invention described herein, the polynucleotides and polypeptides of the invention have a variety of additional uses. These uses include their use in the recombinant production (i.e., expression) of proteins; as regulators of plant gene expression, as diagnostic probes for the presence of complementary or partially complementary nucleic acids (including for detection of natural coding nucleic acids); as substrates for further reactions, e.g., mutation reactions, PCR reactions, or the like; as substrates for cloning e.g., including digestion or ligation reactions; and for identifying exogenous or endogenous modulators of the transcription factors. The polynucleotide can be, e.g., genomic DNA or RNA, a transcript (such as an mRNA), a cDNA, a PCR product, a cloned DNA, a synthetic DNA or RNA, or the like. The polynucleotide can comprise a sequence in either sense or antisense orientations.

[0068] Expression of genes that encode polypeptides that modify expression of endogenous genes, polynucleotides, and proteins are well known in the art. In addition, transgenic plants comprising isolated polynucleotides encoding transcription factors may also modify expression of endogenous genes, polynucleotides, and proteins. Examples include Peng et al. (1997) Genes Development 11: 3194-3205, and Peng et al. (1999) Nature 400: 256-261. In addition, many others have demonstrated that an Arabidopsis transcription factor expressed in an exogenous plant species elicits the same or very similar phenotypic response. See, for example, Fu et al. (2001) Plant Cell 13: 1791-1802; Nandi et al. (2000) Curr. Biol. 10: 215-218; Coupland (1995) Nature 377: 482-483; and Weigel and Nilsson (1995) Nature 377: 482-500.

[0069] In another example, Mandel et al. (1992b) Cell 71-133-143, and Suzuki et al. (2001) Plant J. 28: 409-418, teach that a transcription factor expressed in another plant species elicits the same or very similar phenotypic response of the endogenous sequence, as often predicted in earlier studies of Arabidopsis transcription factors in Arabidopsis (see Mandel (1992a) Nature 360: 273-277; Suzuki et al. (2001) supra). Other examples include Miller et al. (2001) Plant J. 28: 169-179; Kim et al. (2001) Plant J. 25: 247-259; Kyozuka and Shimamoto (2002) Plant Cell Physiol. 43: 130-135; Boss and Thomas (2002) Nature, 416: 847-850; He et al. (2000) Transgenic Res. 9: 223-227; and Robson et al. (2001) Plant J. 28: 619-631.

[0070] In yet another example, Gilmour et al. (1998) Plant J. 16: 433-442, teach an Arabidopsis AP2 transcription factor, CBF1, which, when overexpressed in transgenic plants, increases plant freezing tolerance. Jaglo et al. (2001) Plant Physiol. 127: 910-917, further identified sequences in Brassica napus which encode CBF-like genes and that transcripts for these genes accumulated rapidly in response to low temperature. Transcripts encoding CBF-like proteins were also found to accumulate rapidly in response to low temperature in wheat, as well as in tomato. An alignment of the CBF proteins from Arabidopsis, B. napus, wheat, rye, and tomato revealed the presence of conserved consecutive amino acid residues, PKK/RPAGRxKFxETRHP (SEQ ID NO: 9) and DSAWR (SEQ ID NO: 10), which bracket the AP2/EREBP DNA binding domains of the proteins and distinguish them from other members of the AP2/EREBP protein family. (Jaglo et al. (2001) supra)

[0071] Transcription factors mediate cellular responses and control traits through altered expression of genes containing cis-acting nucleotide sequences that are targets of the introduced transcription factor. It is well appreciated in the art that the effect of a transcription factor on cellular responses or a cellular trait is determined by the particular genes whose expression is either directly or indirectly (e.g., by a cascade of transcription factor binding events and transcriptional changes) altered by transcription factor binding. In a global analysis of transcription comparing a standard condition with one in which a transcription factor is overexpressed, the resulting transcript profile associated with transcription factor overexpression is related to the trait or cellular process controlled by that transcription factor. For example, the PAP2 gene and other genes in the MYB family have been shown to control anthocyanin biosynthesis through regulation of the expression of genes known to be involved in the anthocyanin biosynthetic pathway (Bruce et al. (2000) Plant Cell 12: 65-79; and Borevitz et al. (2000) Plant Cell 12: 2383-2393). Further, global transcript profiles have been used successfully as diagnostic tools for specific cellular states (e.g., cancerous vs. non-cancerous; Bhattacharjee et al. (2001) Proc. Natl. Acad. Sci. USA 98: 13790-13795; and Xu et al. (2001) Proc. Natl. Acad. Sci. USA 98: 15089-15094). Consequently, it is evident to one skilled in the art that similarity of transcript profile upon overexpression of different transcription factors would indicate similarity of transcription factor function.

[0072] Polypeptides and Polynucleotides of the Invention

[0073] The present invention includes putative transcription factors (TFs), and isolated or recombinant polynucleotides encoding the polypeptides, or novel sequence variant polypeptides or polynucleotides encoding novel variants of polypeptides derived from the specific sequences provided in the Sequence Listing; the recombinant polynucleotides of the invention may be incorporated in expression vectors for the purpose of producing transformed plants. Also provided are methods for modifying yield from a plant by modifying the mass, size or number of plant organs or seed of a plant by controlling a number of cellular processes, and for increasing a plant's resistance to abiotic stresses. These methods are based on the ability to alter the expression of critical regulatory molecules that may be conserved between diverse plant species. Related conserved regulatory molecules may be originally discovered in a model system such as Arabidopsis and homologous, functional molecules then discovered in other plant species. The latter may then be used to confer increased yield or abiotic stress tolerance in diverse plant species.

[0074] Exemplary polynucleotides encoding the polypeptides of the invention were identified in the Arabidopsis thaliana GenBank database using publicly available sequence analysis programs and parameters. Sequences initially identified were then further characterized to identify sequences comprising specified sequence strings corresponding to sequence motifs present in families of known polypeptides. In addition, further exemplary polynucleotides encoding the polypeptides of the invention were identified in the plant GenBank database using publicly available sequence analysis programs and parameters. Sequences initially identified were then further characterized to identify sequences comprising specified sequence strings corresponding to sequence motifs present in families of known polypeptides.

[0075] Additional polynucleotides of the invention were identified by screening Arabidopsis thaliana and/or other plant cDNA libraries with probes corresponding to known polypeptides under low stringency hybridization conditions. Additional sequences, including full length coding sequences, were subsequently recovered by the rapid amplification of cDNA ends (RACE) procedure using a commercially available kit according to the manufacturer's instructions. Where necessary, multiple rounds of RACE are performed to isolate 5′ and 3′ ends. The full-length cDNA was then recovered by a routine end-to-end polymerase chain reaction (PCR) using primers specific to the isolated 5′ and 3′ ends. Exemplary sequences are provided in the Sequence Listing.

[0076] Many of the sequences in the Sequence Listing, derived from diverse plant species, have been ectopically expressed in overexpressor plants. The changes in the characteristic(s) or trait(s) of the plants were then observed and found to confer increased yield and/or increased abiotic stress tolerance. Therefore, the polynucleotides and polypeptides can be used to improve desirable characteristics of plants.

[0077] The polynucleotides of the invention were also ectopically expressed in overexpressor plant cells and the changes in the expression levels of a number of genes, polynucleotides, and/or proteins of the plant cells observed. Therefore, the polynucleotides and polypeptides can be used to change expression levels of genes, polynucleotides, and/or proteins of plants or plant cells.

### The G11792 Clade of Transcription Factors

[0078] We first identified G1792 (AT3G23230; SEQ ID NO: 169 and 170 of U.S. Pat. No. 7,193,129) as a transcription factor in the sequence of BAC clone K14B15 (AB025608, gene K14B15.14). We have assigned the name TRANSCRIPTIONAL REGULATOR OF DEFENSE RESPONSE 1 (TDR1) to this gene, based on its apparent role in disease responses. The G1792 transcription factor and closely related proteins in the G1792 clade contain a single AP2 domain and belongs to the ERF class of AP2 proteins. The G11792 clade includes TDR4 and other transcription factors found in Table 1; a number of these sequences have been shown to confer increased disease tolerance in plants when overexpressed (see, for example, patent publications US20050155117A1, and particularly Table 15 of PCT/US2006/34615).

[0079] The G1792 clade of transcription factors is characterized by at least two domains responsible for transcription regulatory activity, the AP2 DNA binding domain and the EDLL activation domain (Table 1). Conservative mutations in these domains will result in G1792 clade member polypeptides having activity transcription regulatory activity and functions similar to those performed by G11792 in plant cells. Although all conservative amino acid substitutions in these domains will not necessarily result in the clade member polypeptides having regulatory activity, those of ordinary skill in the art would expect that many of these conservative substitutions would result in a protein having the regulatory activity. Further, amino acid substitutions outside of these two functional domains and other conserved domains in the G1792 clade proteins are unlikely to greatly affect activity the regulatory activity of the G1792 polypeptides.

### The G28 Clade of Transcription Factors, Including Pti4

[0080] G28 (SEQ ID NO: 17 and 18 of U.S. Pat. No. 6,664,446) corresponds to AtERF1 (GenBank accession number AB008103) (Fujimoto et al. (2000) Plant Cell 12: 393-404). G28 appears as gene At4g17500 in the annotated sequence of Arabidopsis chromosome 4 (AL161546.2). G28 has been shown to confer resistance to both necrotrophic and biotrophic pathogens. The G28 polypeptide (SEQ ID NO: 18 of U.S. Pat. No. 6,664,446) is a member of the B-3a subgroup of the ERF subfamily of AP2 transcription factors, defined as having a single AP2 domain and having specific residues in the DNA binding domain that distinguish this large subfamily (65 members) from the DREB subfamily. AtERF1 is apparently orthologous to the AP2 transcription factor Pti4 (SEQ ID NO: 4 of the present application), identified in tomato, which has been shown by Martin and colleagues to function in the Pto disease resistance pathway, and to confer broad-spectrum disease resistance when overexpressed in Arabidopsis (Zhou et al. (1997) EMBO J. 16: 3207-3218; Gu et al. (2000) Plant Cell 12: 771-786; Gu et al. (2002) Plant Cell 14: 817-831).

[0081] In addition to the AP2 DNA binding domain, the G28 clade of transcription factors is characterized by a potential acidic activation domain and a potential nuclear localization domain. In Pti4, these domains span amino acids 32-56 and 177-199, approximately and respectively. In G28, these domains span amino acids of about 66-90 and 219-238, approximately and respectively. Conservative mutations in these domains will result in G28 clade member polypeptides having activity transcription regulatory activity and functions similar to those performed by G28 or Pti4 in plant cells. Although all conservative amino acid substitutions in these domains will not necessarily result in the clade member polypeptides having regulatory activity, those of ordinary skill in the art would expect that many of these conservative substitutions would result in a protein having the regulatory activity. Further, amino acid substitutions outside of these functional domains and other conserved domains in these proteins are unlikely to greatly affect activity the regulatory activity of the G28 polypeptides.

[0082] Tables 1-2 list a number of polypeptides of the invention and include the amino acid residue coordinates for the conserved domains, the conserved domain sequences of the respective polypeptides; the identity in percentage terms to the conserved domain of the lead Arabidopsis sequence (the first transcription factor listed in each table), and whether the given sequence in each row was shown to confer increased biomass and yield or stress tolerance in plants (+) or has thus far not been shown to confer stress tolerance (−) for each given promoter::gene combination in our experiments. Percentage identities to the sequences listed in Tables 1-2 were determined using BLASTP analysis with defaults of wordlength (W) of 3, an expectation (E) of 10, and the BLOSUM62 scoring matrix Henikoff & Henikoff (1992). When the conserved domain sequences found in Tables 1-2 are optimally aligned using the BLOSUM62 matrix, a gap existence penalty of 11, and a gap extension penalty of 1, similar conserved domains may be identified by virtue of having a minimum specified percentage identity. Said minimum percentage identity may be determined by the percentage identities found within a given clade of transcription factors. Examples of percentage identities to Arabidopsis sequences that are clade members are provided in Tables 1-2, although it is anticipated and expected that other percentage identities may be determined by related lade sequences to another Arabidopsis sequence, or a sequence from another plant species, where that sequence is a functional lade member.

TABLE 1

Conserved domains of TDR4 (G1792 clade member, TF family
AP2) and some closely related sequences in the G1792 clade

| | AP2 and | | | | | | | Disease |
|---|---|---|---|---|---|---|---|---|
| GID No./ | EDLL | | SEQ ID | % ID to | | SEQ ID | % ID to | resistance |
| Species | Domains in | | NO: of | AP2 | | NO: of | EDLL | observed in |
| SEQ ID | Amino Acid | | AP2 | Domain | EDLL | EDLL | Domain | overexpressors |
| NO: | Coordinates | AP2 domain | domain | of TDR4 | Domain | domain | of TDR4 | tested to date |
| At/TDR4 | 16-80; 100- | EQGKYRGVRRR | 41 | 100% | VFEFEY | 57 | 100% | B, E, S |
| (G30) | 115 | PWGKYAAEIRD | | | LDDSVL | | | |
| (2) | | SRKHGERVWLG | | | DELL | | | |
| | | TFDTAEDAARA | | | | | | |
| | | YDRAAYSMRG | | | | | | |
| | | KAAILNFPHEY | | | | | | |
| At/G1795 | 11-75; 104- | EHGKYRGVRRR | 42 | 93% | VFEFEY | 58 | 93% | B, E, S |
| (12) | 119 | PWGKYAAEIRD | | | LDDSVL | | | |
| | | SRKHGERVWLG | | | EELL | | | |
| | | TFDTAEEAARA | | | | | | |
| | | YDQAAYSMRG | | | | | | |
| | | QAAILNFPHEY | | | | | | |
| At/G1791 | 10-74; 108- | NEMKYRGVRK | 43 | 85% | VIEFEYL | 59 | 81% | B, E, S |
| (14) | 123 | RPWGKYAAEIR | | | DDSLLE | | | |
| | | DSARHGARVWL | | | ELL | | | |
| | | GTFNTAEDAAR | | | | | | |
| | | AYDRAAFGMR | | | | | | |
| | | GQRAILNFPHEY | | | | | | |
| Os/G3381 | 14-78; 109- | LVAKYRGVRRR | 44 | 84% | PIEFEYL | 60 | 78% | E, S |
| (16) | 124 | PWGKFAAEIRD | | | DDHVL | | | |
| | | SSRHGVRVWLG | | | QEML | | | |
| | | TFDTAEEAARA | | | | | | |
| | | YDRSAYSMRGA | | | | | | |
| | | NAVLNFPADA | | | | | | |
| Os/G3383 | 9-73; 101- | TATKYRGVRRR | 45 | 81% | KIEFEYL | 61 | 85% | |
| (18) | 116 | PWGKFAAEIRD | | | DDKVL | | | |
| | | PERGGARVWLG | | | DDLL | | | |
| | | TFDTAEEAARA | | | | | | |
| | | YDRAAYAQRG | | | | | | |
| | | AAAVLNFPAAA | | | | | | |
| Zm/G3739 | 13-77; 107- | EPTKYRGVRRR | 46 | 79% | VIELEY | 62 | 68% | E |
| (20) | 122 | PWGKYAAEIRD | | | LDDEVL | | | |
| | | SSRHGVRIWLG | | | QEML | | | |
| | | TFDTAEEAARA | | | | | | |
| | | YDRSAYSMRGA | | | | | | |
| | | NAVLNFPEDA | | | | | | |
| Zm/G3517 | 13-77; 103- | EPTKYRGVRRR | 47 | 78% | VIEFEYL | 63 | 75% | E, S |
| (22) | 118 | PWGKYAAEIRD | | | DDEVLQ | | | |
| | | SSRHGVRIWLG | | | EML | | | |
| | | TFDTAEEAARA | | | | | | |
| | | YDRSANSMRGA | | | | | | |
| | | NAVLNFPEDA | | | | | | |
| Os/G3737 | 8-72; 101- | AASKYRGVRRR | 48 | 77% | KVELVY | 64 | 78% | E |
| (24) | 116 | PWGKFAAEIRD | | | LDDKVL | | | |
| | | PERGGSRVWLG | | | DELL | | | |
| | | TFDTAEEAARA | | | | | | |
| | | YDRAAFAMKG | | | | | | |
| | | AMAVLNFPGRT | | | | | | |
| Gm/G3520 | 14-78; 109- | EEPRYRGVRRR | 49 | 76% | VIEFECL | 65 | 62% | E, S |
| (26) | 124 | PWGKFAAEIRD | | | DDKLLE | | | |
| | | PARHGARVWLG | | | DLL | | | |
| | | TFLTAEEAARA | | | | | | |
| | | YDRAAYEMRG | | | | | | |
| | | ALAVLNFPNEY | | | | | | |
| Os/G3380 | 18-82; 103- | ETTKYRGVRRR | 50 | 76% | VIELECL | 66 | 62% | E |
| (28) | 118 | PSGKFAAEIRDS | | | DDQVL | | | |
| | | SRQSVRVWLGT | | | QEML | | | |
| | | FDTAEEAARAY | | | | | | |
| | | DRAAYAMRGH | | | | | | |
| | | LAVLNFPAEA | | | | | | |
| Zm/G3794 | 6-70; 102- | EPTKYRGVRRR | 51 | 75% | VIELECL | 67 | 62% | |
| (30) | 117 | PSGKFAAEIRDS | | | DDQVL | | | |
| | | SRQSVRMWLGT | | | QEML | | | |
| | | FDTAEEAARAY | | | | | | |
| | | DRAAYAMRGQI | | | | | | |
| | | AVLNFPAEA | | | | | | |
| Zm/G3516 | 6-70; 107- | KEGKYRGVRKR | 52 | 74% | KVELEC | 68 | 71% | |
| (32) | 122 | PWGKFAAEIRD | | | LDDRVL | | | |
| | | PERGGSRVWLG | | | EELL | | | |
| | | TFDTAEEAARA | | | | | | |
| | | YDRAAFAMKG | | | | | | |
| | | ATAVLNFPASG | | | | | | |
| Gm/G3519 | 13-77; 128- | CEVRYRGIRRRP | 53 | 72% | TFELEY | 69 | 66% | E |
| (34) | 143 | WGKFAAEIRDP | | | LDNKLL | | | |
| | | TRKGTRIWLGTF | | | EELL | | | |
| | | DTAEQAARAYD | | | | | | |
| | | AAAFHFRGHRA | | | | | | |
| | | ILNFPNEY | | | | | | |
| Gm/G3518 | 13-77; 135- | VEVRYRGIRRRP | 54 | 72% | TFELEY | 70 | 60% | E |
| (36) | 150 | WGKFAAEIRDP | | | FDNKLL | | | |
| | | TRKGTRIWLGTF | | | EELL | | | |
| | | DTAEQAARAYD | | | | | | |
| | | AAAFHFRGHRA | | | | | | |
| | | ILNFPNEY | | | | | | |
| Os/G3515 | 11-75; 116- | SSSSYRGVRKRP | 55 | 72% | KVELEC | 71 | 56% | |
| (38) | 131 | WGKFAAEIRDP | | | LDDKVL | | | |
| | | ERGGARVWLGT | | | EDLL | | | |
| | | FDTAEEAARAY | | | | | | |
| | | DRAAFAMKGAT | | | | | | |
| | | AMLNFPGDH | | | | | | |
| At/G1792 | 16-80; 117- | KQARFRGVRRR | 56 | 70% | VFEFEY | 72 | 87% | B, E, S |
| (40) | 132 | PWGKFAAEIRD | | | LDDKVL | | | |
| | | PSRNGARLWLG | | | EELL | | | |
| | | TFETAEEAARA | | | | | | |
| | | YDRAAFNLRGH | | | | | | |
| | | LAILNFPNEY | | | | | | |

TABLE 2

Conserved domains of Pti4 (TF family: AP2) and some closely
related sequences in the G28 clade

| | | | | | |
|---|---|---|---|---|---|
| Species/GID No., | | | | | Disease resistance |
| Accession No., or | AP2 Domain | | | % ID to | observed in |
| Identifier | Amino Acid | | SEQ ID NO: of | conserved AP2 | overexpressors |
| (SEQ ID NO:) | Coordinates | AP2 Domain | EDLL domain | domain of Pti4 | tested to date |

| | | | | | |
|---|---|---|---|---|---|
| Sl/Pti4 | 102-166 | KGRHYRGVRQRPWGKF | 97 | 100% | E, S |
| (4) | | AAEIRDPAKNGARVWL | | | |
| | | GTYETAEEAAIAYDKAA | | | |
| | | YRMRGSKAHLNFPHRI | | | |
| Gm/G3718 | 139-203 | KGKHYRGVRQRPWGKF | 98 | 87% | E, S |
| (74) | | AAEIRDPAKNGARVWL | | | |
| | | GTFETAEDAALAYDRA | | | |
| | | AYRMRGSRALLNFPLRI | | | |
| Gm/G3717 | 130-194 | KGKHYRGVRQRPWGKF | 99 | 86% | E, S |
| (76) | | AAEIRDPAKNGARVWL | | | |
| | | GTFETAEDAALAYDRA | | | |
| | | AYRMRGSRALLNFPLRV | | | |
| At/G28 | 144-208 | KGKHYRGVRQRPWGKF | 100 | 84% | B, E, S |
| (78) | | AAEIRDPAKNGARVWL | | | |
| | | GTFETAEDAALAYDRA | | | |
| | | AFRMRGSRALLNFPLRV | | | |
| Bo/G3659 | 130-194 | KGKHYRGVRQRPWGKF | 101 | 84% | E |
| (80) | | AAEIRDPAKNGARVWL | | | |
| | | GTFETAEDAALAYDRA | | | |
| | | AFRMRGSRALLNFPLRV | | | |
| Zm/G3856 | 140-204 | RGKHYRGVRQRPWGKF | 102 | 84% | E, S |
| (82) | | AAEIRDPAKNGARVWL | | | |
| | | GTYDSAEDAAVAYDRA | | | |
| | | AYRMRGSRALLNFPLRI | | | |
| Os/G3430 | 145-209 | RGKHYRGVRQRPWGKF | 103 | 84% | B, E, S |
| (84) | | AAEIRDPAKNGARVWL | | | |
| | | GTFDSAEEAAVAYDRA | | | |
| | | AYRMRGSRALLNFPLRI | | | |
| Os/G3848 | 149-213 | RGKHYRGVRQRPWGKF | 104 | 84% | B, E, S |
| (86) | | AAEIRDPAKNGARVWL | | | |
| | | GTFDTAEDAALAYDRA | | | |
| | | AYRMRGSRALLNFPLRI | | | |
| Zm/G3661 | 126-190 | RGKHYRGVRQRPWGKF | 105 | 84% | E |
| (88) | | AAEIRDPARNGARVWL | | | |
| | | GTYDTAEDAALAYDRA | | | |
| | | AYRMRGSRALLNFPLRI | | | |
| At/G1006 | 113-117 | KAKHYRGVRQRPWGKF | 106 | 83% | E, S |
| (90) | | AAEIRDPAKNGARVWL | | | |
| | | GTFETAEDAALAYDIAA | | | |
| | | FRMRGSRALLNFPLRV | | | |
| Bo/G3660 | 119-183 | KGKHYRGVRQRPWGKF | 107 | 81% | B, E, S |
| (92) | | AAEIRDPAKKGAREWL | | | |
| | | GTFETAEDAALAYDRA | | | |
| | | AFRMRGSRALLNFPLRV | | | |
| Ta/G3864 | 127-191 | RGKHFRGVRQRPWGKF | 108 | 81% | |
| (94) | | AAEIRDPAKNGARVWL | | | |
| | | GTFDSAEDAAVAYDRA | | | |
| | | AYRMRGSRALLNFPLRI | | | |
| At/G22 | 88-152 | KGMQYRGVRRRPWGKF | 109 | 80% | |
| (96) | | AAEIRDPKKNGARVWL | | | |
| | | GTYETPEDAAVAYDRA | | | |
| | | AFQLRGSKAKLNFPHLI | | | |

Disease resistance abbreviations: B - Botrytis; E - Erysiphe; S - Sclerotinia
Species abbreviations for Tables 1-2: At - Arabidopsis thaliana; Bo - Brassica oleracea; Gm - Glycine max; Os - Oryza sativa; Sl - Solanum lycopersicum; Ta - Triticum aestivum; Zm - Zea mays

### EXAMPLES

[0083] The data herein represent results obtained in experiments with polynucleotides and polypeptides that may be expressed in plants for the purpose of reducing yield losses that arise from biotic and abiotic stress. The invention, now being generally described, will be readily understood by reference to the following examples, which are included for purposes of illustration of certain aspects and embodiments of the present invention and are not intended to limit the invention. It will be recognized by one of skill in the art that a transcription factor that is associated with a particular first trait may also be associated with at least one other, unrelated and inherent second trait that was not predicted by the first trait.

### Example I

### Production of Plants Expressing TDR4 Under a Dexamethasone-Inducible System

[0084] Transformation. Transformation of Arabidopsis was performed by an Agrobacterium-mediated protocol based on the method of Bechtold and Pelletier (1998) Methods Mol. Biol. 82: 259-266. Unless otherwise specified, all experimental work was performed using the Columbia ecotype.

[0085] Plant preparation. Arabidopsis seeds were sown on mesh covered pots. The seedlings were thinned so that 6-10 evenly spaced plants remained on each pot 10 days after planting. The primary bolts were cut off a week before transformation to break apical dominance and encourage auxiliary shoots to form. Transformation was typically performed at 4-5 weeks after sowing.

[0086] Bacterial culture preparation. Agrobacterium stocks were inoculated from single colony plates or from glycerol stocks and grown with the appropriate antibiotics and grown until saturation. On the morning of transformation, the saturated cultures were centrifuged and bacterial pellets are re-suspended in Infiltration Media (0.5×MS, 1×B5 Vitamins, 5% sucrose, 1 mg/ml benzylaminopurine riboside, 200 μl/L Silwet L77) until an A600 reading of 0.8 was reached.

[0087] Transformation and seed harvest. The Agrobacterium solution was poured into dipping containers. All flower buds and rosette leaves of the plants were immersed in this solution for 30 seconds. The plants were laid on their side and wrapped to keep the humidity high. The plants were kept this way overnight at 4° C. and then the pots were turned upright, unwrapped, and moved to the growth racks.

[0088] The plants were maintained on the growth rack under 24-hour light until seeds were ready to be harvested. Seeds were harvested when 80% of the siliques of the transformed plants were ripe (approximately 5 weeks after the initial transformation). This seed was deemed T0 seed, since it was obtained from the T0 generation, and was later plated on selection plates (either kanamycin or sulfonamide). Resistant plants that were identified on such selection plates comprise the T1 generation.

[0089] Establishment of the dexamethasone-inducible TDR4 Arabidopsis line. A kanamycin-resistant line expressing the activator construct described in FIG. 3 was produced by the methods specified above. Homozygous T3 progeny were selected from this line and verified to produce the desired dexamethasone-inducible expression pattern of the GFP reporter gene. A homozygous line was then transformed with the target construct carrying TDR4 under the control of the LexA operator. Plant lines were made homozygous for the TDR4 transgene and single insertion lines were identified by Southern blotting using standard molecular methods (see Current Protocols in Molecular Biology, Ausubel et al. eds., Current Protocols, a joint venture between Greene Publishing Associates, Inc. and John Wiley & Sons, Inc., (supplemented through 2000); “Ausubel”).

### Example II

### Mutagenesis

[0090] Dexamethasone-inducible TDR4 Arabidopsis seeds were mutagenized with ethyl methane sulfonate (EMS) as described by Redei and Koncz (1992) “Classical Mutagenesis”, In C Koncz, N-H Chua, J. Schell, eds, Methods in Arabidopsis Research. World Scientific, Singapore, pp 16-82. Seeds were imbibed in H₂O overnight at room temperature, than shaken in 50 ml Falcon tubes with 25 ml of 50 mM EMS for 8 hours at room temperature and washed 10 times with sterile distilled water after EMS treatment. For a final wash step, seeds were shaken in sterile distilled water overnight at room temperature. The next morning, 0.1% agarose was added to the Falcon tube and seeds were stored at 4° C. for 48 h.

[0091] Seeds were then planted into 2×5 cell flats filled with Sunshine Soil Mix (+entomite). About 100 seeds were placed into each cell. After germination, the number of albino plants was scored to estimate the mutation level. Plants grew at 20° C. and 24 h light, were fertilized weekly and pools of 100 plants=1 cell were bagged and harvested. One hundred 10-cell flats were grown and thus 1000 pools were generated.

### Example III

### Suppressor Mutation Screen

[0092] Plant lines constitutively expressing TDR4 are severely stunted, while the dexamethasone-inducible TDR4 lines when not exposed to dexamethasone have a growth phenotype significantly more similar to wild-type plants than 35S::TDR4 overexpressing lines in that the dexamethasone-inducible TDR4 lines had fewer or reduced adverse morphological or developmental effects than the wild-type controls. Use of the dexamethasone inducible system therefore allowed for generation of T2 seeds for mutagenesis, which was not possible with the 35S::TDR4 lines due to severe growth defects and infertility. Screening of the M2 pools was therefore conducted on plates containing 5 μM dexamethasone in order to reveal the growth retardation phenotype. Other components of the medium were 50% MS salts (Murashige and Skoog (1962) Physiol. Plant. 15: 473-497), 1% sucrose, and 0.05% MES (2-(N-Morpholino)ethanesulfonic acid hydrate). About 1200 seeds per pool were screened. Seeds were surface sterilized in the following manner: (1) 5 minute incubation with mixing in 70% ethanol; (2) 20 minute incubation with mixing in 30% bleach, 0.01% Triton X-100; (3) five rinses with sterile water. The seeds were resuspended in 0.1% sterile agarose and stratified at 4° C. for 2-4 days. Two hundred ethanol/bleach sterilized seeds were plated onto one 150×15 Petri dish which amounts to 6 plates/pool. Plates were transferred to 22° C. germination chambers with 24 h light. One plate with the non-mutagenized TDR4 line as well as one plate with a line containing a target construct lacking the TDR4 transgene were also plated as controls. Under these conditions, the dexamethasone-inducible TDR4 lines showed obvious growth retardation in comparison to the control plants lacking the TDR transgene. After 12-13 days, plates were examined for seedlings with relatively normal morphology. These plants were then screened for retention of GFP fluorescence, to eliminate mutations in the activator construct. Putative mutants were transferred to soil to collect seed.

### Example IV

### Sequencing of the TDR4 Transgene

[0093] While the selected M2 plants were growing in soil, leaf samples were taken for DNA extraction and PCR analysis, performed by standard methods (see, for example, Ausubel, supra). The TDR4 transgene sequence was amplified using a forward primer within the TDR 5′ untranslated region (SEQ ID NO: 7) and a 3′ primer within the cloning vector (SEQ ID NO: 8). The resulting PCR product was sequenced to identify any mutations within the transgene.

[0094] Sequences were analyzed using Sequencher DNA sequence analysis software (Gene Codes Corporation, Ann Arbor, Mich.). Plants that harbored no mutations in the TDR4 transgene coding sequence were presumed to carry second site mutations, or mutations in the LexA operator fused to the TDR4 gene, and were not analyzed further. Some putative mutants showed double peaks at possible mutation sites, indicating heterozygosity. The M3 generation was grown for these EMS lines and DNA samples were taken from 5-8 plants to identify the line with the mutation either by a restriction digestion with CAPS markers, when possible or by sequencing of TDR4. Lines harboring the mutation where further analyzed as described below.

### Example V

### Disease Assays

[0095] M3 progeny of the M2 mutant plants isolated above were tested in disease assays in the presence of 5 μM dexamethasone to determine whether the mutated TDR4 would still provide disease resistance.

[0096] Resistance to Sclerotinia sclerotiorum and Botrytis cinerea were assessed in plate-based assays. Unless otherwise stated, all experiments were performed with the Arabidopsis thaliana ecotype Columbia (Col-0). Control plants for assays on lines containing direct promoter-fusion constructs were wild-type plants or Col-0 plants transformed with an empty transformation vector.

[0097] Prior to plating, seed for all experiments were surface sterilized in the following manner: (1) 5 minute incubation with mixing in 70% ethanol; (2) 20 minute incubation with mixing in 30% bleach, 0.01% Triton X-100; (3) five rinses with sterile water. Seeds were resuspended in 0.1% sterile agarose and stratified at 4° C. for 2-4 days.

[0098] Sterile seeds were sown on starter plates (15 mm deep) containing the following medium: 50% MS solution, 1% sucrose, 0.05% MES, and 1% Bacto-Agar. 40 to 50 seeds were sown on each plate. Plates were incubated at 22° C. under 24-hour light (95-110 μE m-2 s-1) in a germination growth chamber. On day 10, seedlings were transferred to assay plates (25 mm deep plates with medium minus sucrose, plus 5 μM dexamethasone). On day 14, seedlings were inoculated (specific method below). After inoculation, plates were put in a growth chamber under a 12-hour light/12-hour dark schedule. Light intensity was lowered to 70-80 μE m-2 s-1 for the disease assay.

[0099] Sclerotinia inoculum preparation. A Sclerotinia liquid culture was started three days prior to plant inoculation by cutting a small agar plug (¼ sq. inch) from a 14- to 21-day old Sclerotinia plate (on Potato Dextrose Agar; PDA) and placing it into 100 ml of half-strength Potato Dextrose Broth. The culture was allowed to grown in the Potato Dextrose Broth at room temperature under 24-hour light for three days. On the day of seedling inoculation, the hyphal ball was retrieved from the medium, weighed, and ground in a blender with water (50 ml/gm tissue). After grinding, the mycelial suspension was filtered through two layers of cheesecloth and the resulting suspension was diluted 1:5 in water. Plants were inoculated by spraying to run-off with the mycelial suspension using a Preval aerosol sprayer (Precision-Valve Corporation, Yonkers, N.Y.).

[0100] Botrytis inoculum preparation. Botrytis inoculum was prepared on the day of inoculation. Spores from a 14- to 21-day old plate were resuspended in a solution of 0.05% glucose, 0.03M KH₂PO₄ to a final concentration of 10⁴ spores/ml. Seedlings were inoculated with a Preval aerosol sprayer, as with Sclerotinia inoculation.

[0101] Data Interpretation. After the plates were evaluated, each line was given one of the following overall scores:

[0102] (++) Substantially enhanced resistance compared to controls. The phenotype was very consistent across all plates for a given line.

[0103] (+) Enhanced resistance compared to controls. The response was consistent but was only moderately above the normal levels of variability observed for that assay.

[0104] (wt) No detectable difference from wild-type controls.

[0105] (−) Increased susceptibility compared to controls. The response was consistent but was only moderately above the normal levels of variability observed for that assay.

[0106] (−−) Substantially impaired performance compared to controls. The phenotype was consistent and growth was significantly above the normal levels of variability observed for that assay.

[0107] (n/d) Experiment failed, data not obtained, or assay not performed.

### Example VI

### Confirmation of Mutations

[0108] It is possible that a line containing a TDR4 transgene mutation also harbors another mutation that affects disease resistance in general or TDR4 function specifically. Therefore, the mutant alleles identified in the morphology and disease screens will be amplified from the transgenic plants, re-cloned behind the 35S constitutive promoter, and transformed into wild-type Col-0 Arabidopsis plants. T1 transformants will be selected on kanamycin and T2 plants will be tested for disease resistance. Disease resistance seen in multiple, independently-transformed lines with normal morphology will demonstrate a direct correlation between the mutant TDR4 allele and disease resistance without severe growth penalty.

### Example VII

### Mutagenesis of Pti4

[0109] Pti4, SEQ ID NO: 4, is an AP2 domain transcription factor that produces disease resistance when expressed under a constitutive Cauliflower Mosaic Virus 35S promoter. However, plants expressing Pti4 under a constitutive promoter are stunted, dark green, and late flowering. Because 35S::Pti4 transgenic plants are fertile, a variant of the method described above for TDR4 is used. Homozygous 35S::Pti4 transgenic plants are produced by standard transformation techniques as described in Example I above. Either a 35S::Pti4 direct promoter fusion construct or a two-component approach could be used. The resulting plants are mutagenized with EMS as described in Example II above. M2 plants are then planted either on sterile medium in the absence of dexamethasone, or on soil, and are screened visually for plants with reduced stunting, dark green color, or flowering delay. Such plants are saved for seed, and leaf tissue is harvested for amplification and sequencing of the Pti4 transgene using standard methods. Plants harboring mutations in the Pti4 transgene are saved for seed, and their progeny are assayed for disease resistance as described in Example V above. For plants showing disease resistance, the altered Pti4 transgene is cloned and re-transformed into plants to confirm the beneficial phenotype.

### Example VIII

### The Present Methods May be Used to Select for Beneficial Sequence Changes to Other Transcription Factor Families

[0110] The methods described above represent an improvement on a basic suppressor mutagenesis screen with plant lines ectopically expressing transcription factors under the regulatory control of the 35S promoter. The present methods provide an approach to overexpress deleterious or near-lethal transcription factors that, when transformed into plants using a constitutive regulation means, produce stunted or developmentally retarded plants with reduced or no fertility. A strong selection for beneficial sequence changes (i.e., mutations that do not produce severely and adversely affected plants) may be applied since all of the plants lacking those mutations grow extremely slowly or die when dexamethasone is applied.

[0111] The same approach may be taken with transcription factor polynucleotides and their predicted polypeptides that may produce moderate highly deleterious effects in plants when the sequences are overexpressed in plants. A listing of Arabidopsis sequences for which any deleterious or undesirable developmental or morphological effects of constitutive overexpression may be mitigated to some degree are provided as SEQ ID NOs: 110-973. It is expected that the same approach may be employed with sequences that are orthologous to SEQ ID NOs: 110-973 and which function in the same regard as the Arabidopsis sequences.

[0112] All publications and patent applications mentioned in this specification are herein incorporated by reference to the same extent as if each individual publication or patent application was specifically and individually indicated to be incorporated by reference.

[0113] The present invention is not limited by the specific embodiments described herein. The invention now being fully described, it will be apparent to one of ordinary skill in the art that many changes and modifications can be made thereto without departing from the spirit or scope of the Claims. Modifications that become apparent from the foregoing description and accompanying figures fall within the scope of the following Claims.

The application's sequence listing, which the Patent Office published only in electronic form, follows.

SEQUENCE LISTING (973 sequences)

SEQ ID NO: 1 - DNA, 553 bp, Arabidopsis thaliana
  G30
ctcttctgacgcacaacagtatatacacatacacagatatatggatcaaggaggtcgtagcagtggtagtggaggaggaggagccgagcaagggaagtaccgtggagtaaggagacgaccttggggtaaatacgccgcggaaataagagattcgaggaagcacggagagcgtgtgtggctagggacattcgacactgcggaagacgcggctcgagcctatgaccgagccgcctattcaatgagaggcaaagctgccattctcaacttccctcacgagtataacatgggaaccggatcctcatccactgcggctaattcttcttcctcgtcgcagcaagtttttgagtttgagtacttggacgatagcgttttggatgaacttcttgaatatggagagaactataacaagactcataatatcaacatgggcaagaggcaataaagggaatacaatcggtattaactgaaagttatgtgaaagaccattttcagttataacaaataaaataaaatcccaagcgtacaaagctgtttctaaaaaaaaaaaaaaaaa

SEQ ID NO: 2 - protein, 133 aa, Arabidopsis thaliana
  G30 polypeptide
MDQGGRSSGSGGGGAEQGKYRGVRRRPWGKYAAEIRDSRKHGERVWLGTFDTAEDAARAYDRAAYSMRGKAAILNFPHEYNMGTGSSSTAANSSSSSQQVFEFEYLDDSVLDELLEYGENYNKTHNINMGKRQ

SEQ ID NO: 3 - DNA, 705 bp, Solanum lycopersicum
  Pti4
atggatcaacagttaccaccgacgaacttcccggtagattttccggtgtatcgccggaattcaagcttcagtcgtctaattccctgtttaactgaaaaatggggagatttaccactaaaagtcgacgattccgaagatatggtaatttacggtctattaaaagacgctctaagcgtcggatggtcgccgtttaatttcaccgccggcgaagtaaaatcggagccgagagaagaaattgaatcgtcgcctgaattttcaccttctccggcggagaccacggcagctccggcggctgaaacaccgaaaggaagacattatagaggcgttagacagcgtccgtgggggaaatttgcggcggagattagagatccggcgaagaacggagctagggtttggcttggaacgtacgaaacagctgaagaagctgcaattgcttatgataaagctgcttatagaatgagaggatcaaaagcacatttgaatttcccgcaccggatcggtttgaatgaaccggaaccggttcgagttacggcgaaaaggcgagcatcgccggaaccggcaagctcgtcgggaaacggttccatgaaacggagaagaaaagccgttcagaaatgtgatggagaaatggcgagtagatcaagtgtcatgcaagttggatgtcaaattgaacaattgacaggtgtccatcaactattggtcatttaa

SEQ ID NO: 4 - protein, 234 aa, Solanum lycopersicum
  Pti4 polypeptide
MDQQLPPTNFPVDFPVYRRNSSFSRLIPCLTEKWGDLPLKVDDSEDMVIYGLLKDALSVGWSPFNFTAGEVKSEPREEIESSPEFSPSPAETTAAPAAETPKGRHYRGVRQRPWGKFAAEIRDPAKNGARVWLGTYETAEEAAIAYDKAAYRMRGSKAHLNFPHRIGLNEPEPVRVTAKRRASPEPASSSGNGSMKRRRKAVQKCDGEMASRSSVMQVGCQIEQLTGVHQLLVI

SEQ ID NO: 5 - DNA, 535 bp, artificial sequence
  P3852 (OpLexA::G30 construct)
ctcttctgacgcacaacagtatatacacatacacagatatatggatcaaggaggtcgtagcagtggtagtggaggaggaggagccgagcaagggaagtaccgtggagtaaggagacgaccttggggtaaatacgccgcggaaataagagattcgaggaagcacggagagcgtgtgtggctagggacattcgacactgcggaagacgcggctcgagcctatgaccgagccgcctattcaatgagaggcaaagctgccattctcaacttccctcacgagtataacatgggaaccggatcctcatccactgcggctaattcttcttcctcgtcgcagcaagtttttgagtttgagtacttggacgatagcgttttggatgaacttcttgaatatggagagaactataacaagactcataatatcaacatgggcaagaggcaataaagggaatacaatcggtattaactgaaagttatgtgaaagaccattttcagttataacaaataaaataaaatcccaagcgtacaaagctgtttc

SEQ ID NO: 6 - DNA, 1839 bp, artificial sequence
  P5486 (pMEN262.1_35S::oEnh::LexAGaL4::TA::GR)
atggaagcgttaacggccaggcaacaagaggtgtttgatctcatccgtgatcacatcagccagacaggtatgccgccgacgcgtgcggaaatcgcgcagcgtttggggttccgttccccaaacgcggctgaagaacatctgaaggcgctggcacgcaaaggcgttattgaaattgtttccggcgcatcacgcgggattcgtctgttgcaagaagaggaagaagggttgccgctggtaggtcgtgtggctgccggtgaaccacttctggcgcaacagcatattgaaggtcattatcaggtcgatccttccttattcaagccgaatgctgatttcctgctgcgcgtcagcgggatgtcgatgaaagatatcggcattatggatggtgacttgctggcagtgcataaaactcaggatgtacgtaacggtcaggtcgttgtcgcacgtattgatgacgaggttaccgttaagcgcctgaaaaaacagggcaataaagtcgaactgttgccagaaaatagcgagtttaaaccaattgtcgtagatcttcgtcagcagagcttcaccattgaagggctggcggttggggttattcgcaacggcgactggctggaattccccaattttaatcaaagtgggaatattgctgatagcgcattgtccttcactttcactaacagtagcaacggtccgaacctcataacaactcaaacaaattctcaagcgctttcacaaccaattgcctcctctaacgttcatgataacttcatgaataatgaaatcacggctagtaaaattgatgatggtaataattcaaaaccactgtcacctggttggacggaccaaactgcgtataacgcgtttggaatcactacagggatgtttaataccactacaatggatgatgtatataactatctattcgatgatgaagataccccaccaaacccaaaaaaagctgctgctgctgaggatcctgaagctcgaaaaacaaagaaaaaaatcaaagggattcagcaagccactgcaggagtctcacaagacacttcggaaaatcctaacaaaacaatagttcctgcagcattaccacagctcacccctaccttggtgtcactgctggaggtgattgaacccgaggtgttgtatgcaggatatgatagctctgttccagattcagcatggagaattatgaccacactcaacatgttaggtgggcgtcaagtgattgcagcagtgaaatgggcaaaggcgataccaggcttcagaaacttacacctggatgaccaaatgaccctgctacagtactcatggatgtttctcatggcatttgccctgggttggagatcatacagacaatcaagtggaaacctgctctgctttgctcctgatctgattattaatgagcagagaatgtctctaccctgcatgtatgaccaatgtaaacacatgctgtttgtctcctctgaattacaaagattgcaggtatcctatgaagagtatctctgtatgaaaaccttactgcttctctcctcagttcctaaggaaggtctgaagagccaagagttatttgatgagattcgaatgacttatatcaaagagctaggaaaagccatcgtcaaaagggaagggaactccagtcagaactggcaacggttttaccaactgacaaagcttctggactccatgcatgaggtggttgagaatctccttacctactgcttccagacatttttggataagaccatgagtattgaattcccagagatgttagctgaaatcatcactaatcagataccaaaatattcaaatggaaataccaaaaagcttctgtttcatcaaaaatga

SEQ ID NO: 7 - DNA, 22 bp, artificial sequence
  O52863 forward primer
cgcacaacagtatatacacata

SEQ ID NO: 8 - DNA, 25 bp, artificial sequence
  O53140 reverse primer
caaactcagtaggattctggtgtgt

SEQ ID NO: 9 - protein, 16 aa, Arabidopsis thaliana
  misc_feature (3)..(3): Xaa can be any naturally occurring amino acid
  misc_feature (8)..(8): Xaa can be any naturally occurring amino acid
  misc_feature (11)..(11): Xaa can be any naturally occurring amino acid
  CBF conserved consecutive amino acid residues
PKXPAGRXKFXETRHP

SEQ ID NO: 10 - protein, 5 aa, Arabidopsis thaliana
  CBF conserved consecutive amino acid residues
DSAWR

SEQ ID NO: 11 - DNA, 450 bp, Arabidopsis thaliana
acaaacacgcaaaaagtcattaatatatggatcaaggaggtcgaggtgtcggtgccgagcatggaaagtaccggggagttcggagacgaccttggggaaaatatgcagcagagatacgagattcgaggaagcacggtgaacgtgtgtggcttggaacgttcgatacggcagaggaagcggctagagcctatgaccaagctgcttactccatgagaggccaagcagcaatccttaacttccctcatgagtataacatggggagtggtgtctcttcttccaccgccatggctggatcttcctccgcctccgcctccgcttcttcttcttctaggcaagtttttgaatttgagtacttggatgatagtgttttggaggagctccttgaggaaggagagaaacctaacaagggcaagaagaaatgagcgagatataattcatgattatttctaa

SEQ ID NO: 12 - protein, 131 aa, Arabidopsis thaliana
MDQGGRGVGAEHGKYRGVRRRPWGKYAAEIRDSRKHGERVWLGTFDTAEEAARAYDQAAYSMRGQAAILNFPHEYNMGSGVSSSTAMAGSSSASASASSSSRQVFEFEYLDDSVLEELLEEGEKPNKGKKK

SEQ ID NO: 13 - DNA, 549 bp, Arabidopsis thaliana
atgtacatgcaaaaacaaaaaccttaaaagctttcatggaacgtatagagtcttataacacgaatgagatgaaatacagaggcgtacgaaagcgtccatggggaaaatatgcggcggagattcgcgactcagctagacacggtgctcgtgtttggcttgggacgtttaacacagcggaagacgcggctcgggcttatgatagagcagctttcggcatgagaggccaaagggccattctcaattttcctcacgagtatcaaatgatgaaggacggtccaaatggcagccacgagaatgcagtggcttcctcgtcgtcgggatatagaggaggaggtggtggtgatgatgggagggaagttattgagttcgagtatttggatgatagtttattggaggagcttttagattatggtgagagatctaaccaagacaattgtaacgacgcaaaccgctagatcatcactacttacttacagtgtaatgtttttggagtaaagagtaataatcaatataatatactttagtttaggaaaaaaaaaaaaaaaaaaa

SEQ ID NO: 14 - protein, 139 aa, Arabidopsis thaliana
MERIESYNTNEMKYRGVRKRPWGKYAAEIRDSARHGARVWLGTFNTAEDAARAYDRAAFGMRGQRAILNFPHEYQMMKDGPNGSHENAVASSSSGYRGGGGGDDGREVIEFEYLDDSLLEELLDYGERSNQDNCNDANR

SEQ ID NO: 15 - DNA, 514 bp, Oryza sativa
atcgatcatctgctacgaactcaccctatatatatatactccatcttaggagctgcttgatcgatcgacatatatataactaatggatcatcatcatcagcagcagcagcaggagggtgagctggtggccaagtacaggggcgtgcggcggcggccgtggggcaaattcgcggcagagatccgcgactcgagccggcacggcgtccgcgtgtggctgggcaccttcgacacagccgaggaggccgctcgcgcctacgaccgctccgcctactccatgcgcggcgccaacgccgtcctcaacttccccgccgacgcccacatctacgcccgtcaactacacaataataacgccgctgctggctcttcatcttcctcttccgccgccgccgcagcagccaggccgccgccgatcgagttcgagtacctcgatgaccacgtcctgcaggagatgctccgagaccacaccaccaacaagtagcttactactccactatatatgctgcctgctgcttgt

SEQ ID NO: 16 - protein, 131 aa, Oryza sativa
MDHHHQQQQQEGELVAKYRGVRRRPWGKFAAEIRDSSRHGVRVWLGTFDTAEEAARAYDRSAYSMRGANAVLNFPADAHIYARQLHNNNAAAGSSSSSSAAAAAARPPPIEFEYLDDHVLQEMLRDHTTNK

SEQ ID NO: 17 - DNA, 375 bp, Oryza sativa
atggaggacaaccggagcaaggacacggcgaccaagtaccgcggcgtgaggaggcggccgtggggcaagttcgcggcggagatccgcgacccggagcgcggcggggcgcgcgtctggctcggcaccttcgacaccgccgaggaggcggcgcgtgcctacgaccgcgcggcctacgcccagcgcggcgccgccgccgtgctcaacttcccggccgccgccgccgccggcaggggtggaggagccggcggcgccgcttccgggtcgtcgtcgtcgtcgtccgcgcagcgcggcaggggcgacaagatcgagttcgagtacctcgacgacaaggtgctcgacgatctcctcgacgacgagaagtaccgtggtaaatga

SEQ ID NO: 18 - protein, 124 aa, Oryza sativa
MEDNRSKDTATKYRGVRRRPWGKFAAEIRDPERGGARVWLGTFDTAEEAARAYDRAAYAQRGAAAVLNFPAAAAAGRGGGAGGAASGSSSSSSAQRGRGDKIEFEYLDDKVLDDLLDDEKYRGK

SEQ ID NO: 19 - DNA, 899 bp, Zea mays
cgatataattcactcctctcaacgctcgctgcacacacacaccagtgaacctagccagccatttgccgcatcgatcatcagtcgctgtcacgcgcgccaaaccaaaccaaagcccaaacccagctgcaagtgctactgacagcagctagcaaacacacacccgtcgccatcgctatggacggcgactggtccaaggacggcggaggtggagagccgaccaaatatcgcggcgtgcggcggcggccctggggcaagtacgcggccgagatccgcgactcgagccgccacggcgtccgcatctggctgggcaccttcgacaccgccgaggaggccgccagggcgtacgaccggagcgcctactccatgcgcggcgccaacgccgtcctcaacttcccggaggacgcgcacgcctacgccgccgcctgccgcggctccggatcctcctcatcctcgtccaggcataggcagcagcagcagcagggctccggcagggacgtgatcgagctcgagtacctcgacgacgaggtgctgcaggagatgctcaggaaccacgagccgtcgtcgtctgcgaggaagaagatgtaatgcaagacgactggtacacgtggcgaatgcacgttgcacatcagaatgccatgtatgcgtggggggttacgttcaattgtatgcatgcagtgcagtgactaccggccggctctcctggatatgtcggccatctctctctatatattattaaaatgtcagctcccttctctaatttggcgggagttacatcagtggtactatgcagagttgcatacttgcatatatatgcacattattaattaataactcgatctctcgtggacggtggaacagtgataatcatctcattgtcaattaattttgatcaaagaaat

SEQ ID NO: 20 - protein, 136 aa, Zea mays
MDGDWSKDGGGGEPTKYRGVRRRPWGKYAAEIRDSSRHGVRIWLGTFDTAEEAARAYDRSAYSMRGANAVLNFPEDAHAYAAACRGSGSSSSSSRHRQQQQQGSGRDVIELEYLDDEVLQEMLRNHEPSSSARKKM

SEQ ID NO: 21 - DNA, 477 bp, Zea mays
tacgtccgatccacagccatcatcgccacccgcgcgcttatggatggcgagtggtccaaggacggcggaggcggcgagccgaccaagtaccgcggcgtgcggcgtcggccctggggcaagtacgcggcggagatccgcgactcgagccggcacggcgtccgcatctggctcggcacgttcgacaccgccgaggaggccgccagggcgtacgaccgctccgccaactccatgcgcggcgccaacgccgtgctcaacttcccggaggacgcgcccgcctacgccgccgccgcctcccgtggctccgccggcggatcctcgtccagaccggcgggctccggccgggacgtgatcgagtttgagtacctcgacgacgaggtgctgcaggagatgctcaggagccaggagccgtcggcggcggcggcgcagaagaagaagtagcgcgagcgccacaggtggcgaaacggccgcttttccaaa

SEQ ID NO: 22 - protein, 132 aa, Zea mays
MDGEWSKDGGGGEPTKYRGVRRRPWGKYAAEIRDSSRHGVRIWLGTFDTAEEAARAYDRSANSMRGANAVLNFPEDAPAYAAAASRGSAGGSSSRPAGSGRDVIEFEYLDDEVLQEMLRSQEPSAAAAQKKK

SEQ ID NO: 23 - DNA, 882 bp, Oryza sativa
acacatgcatcgatcattcatggatgccgaattgccgcgatccgggcattatttcgcgccaggagacccaagatcatcgtgtcgcccacgctataaatagctagctagcttgcctttatgttgcatatgccaactgctacatgcaggacgtctgaaactatcattagtgacctgcagcgcctgcagtatatatatacaagtagtagtgagcatggaggacgacaagaaggaggcggcgagcaagtaccgcggcgtacggaggcggccgtggggcaaattcgcggcggagatccgcgacccggagcgcggcggctcacgcgtctggcttggcacgttcgacaccgccgaggaggccgcgcgagcgtacgaccgcgccgcattcgccatgaagggcgctatggccgtgctcaacttcccaggcaggacgagcagcaccggctcttcgtcgtcatcgtcatccacgccgccagctccggtgacgacgagccgccactgcgccgacacgacggagaaggtggagcttgtgtaccttgacgacaaggtgctcgacgagctccttgcggaggactacagctaccgcaacaacaacaactactgatccggccgtcgatgaactgagacggatcgacatggggccggtcgtcggtacgctcgctgaaacgagacccggattgctatcaataagcaagcagaagaaaaccgtctcctatatatagcttcttctgttggcacaagcatatatgggcatgcatgacacatgctactgtgaattgacgggtgtgtgctgtgtgcagactactaaaccacgcttgcaagttgcacgtacgacgtggttgtcaagagcatgcagtccacgaagcagagaaaaacacctggtttatc

SEQ ID NO: 24 - protein, 128 aa, Oryza sativa
MEDDKKEAASKYRGVRRRPWGKFAAEIRDPERGGSRVWLGTFDTAEEAARAYDRAAFAMKGAMAVLNFPGRTSSTGSSSSSSSTPPAPVTTSRHCADTTEKVELVYLDDKVLDELLAEDYSYRNNNNY

SEQ ID NO: 25 - DNA, 440 bp, Glycine max
aaggcacacaatggaagaggagtcaaaggagaaaaagaaggacactaaggaggaaccacgttatagaggagtgcggcggcggccgtgggggaagttcgcggccgagattcgggacccggcccggcacggtgcccgagtgtggctggggacatttctcacggcggaggaggctgctagggcttatgaccgagctgcctatgagatgaggggcgctttagccgttctcaattttccaaatgagtatccttcatgctcttctatgaactcatcttcaacattagcaccttcatcttcttcttcaaattcaatgcttaaaagtgatcatggtaaacaagttattgagttcgagtgcttggatgacaaattgttagaggaccttcttgattgtgatgactatgcctacgagaaagacttgcctaagaactgaacggtttgatcaa

SEQ ID NO: 26 - protein, 138 aa, Glycine max
MEEESKEKKKDTKEEPRYRGVRRRPWGKFAAEIRDPARHGARVWLGTFLTAEEAARAYDRAAYEMRGALAVLNFPNEYPSCSSMNSSSTLAPSSSSSNSMLKSDHGKQVIEFECLDDKLLEDLLDCDDYAYEKDLPKN

SEQ ID NO: 27 - DNA, 579 bp, Oryza sativa
ggtccgatccgtaacagtagtagctagttaatttgattattgtccgtccgcggccggtcagtggtcgcaatcgatcgatcgatatcatggacggcgacggcggcggcggatgggacgatcagggcaacggcggcggcgagacgaccaagtaccgtggcgtgcgtcgccggccttctggcaagttcgcggcggagatccgtgactccagcaggcagagcgtccgcgtctggctgggaaccttcgacaccgccgaggaggctgcgcgggcttacgaccgcgccgcctacgccatgcgcggccacctcgccgtcctcaacttccctgctgaggcgcgcaactacgtgcggggatcaggctcgtcgtcctcgtcccgacagcatcagcagcggcaggtgatcgagctggagtgcctagacgaccaagtgctgcaagagatgctcaagggtggcgacgatcagtacaggtcagcagctgggagcaagaggaataactactagctatatatgctgctaacctacttacaatcgcgatacatatcgaggtttggggattttcttctcacctgtgtgcagaggctgc

SEQ ID NO: 28 - protein, 136 aa, Oryza sativa
MDGDGGGGWDDQGNGGGETTKYRGVRRRPSGKFAAEIRDSSRQSVRVWLGTFDTAEEAARAYDRAAYAMRGHLAVLNFPAEARNYVRGSGSSSSSRQHQQRQVIELECLDDQVLQEMLKGGDDQYRSAAGSKRNNY

SEQ ID NO: 29 - DNA, 918 bp, Zea mays
attacttgtgcacttgggtgcagtgcctgcagtataatcaagttagggtttaaaagaacctcgaccgcgatcgtatatagatccagattatcattagttattagaccactgtgatatcgatggacgacggcggcgagccaaccaagtaccgcggcgtgcggcgccggccgtcggggaagttcgccgccgagatccgcgactccagccggcagagcgtgcgcatgtggctgggcaccttcgacacggccgaggaggccgcaagggcgtacgaccgcgcggcctacgccatgcgcggccaaatcgccgtgctcaacttccccgccgaggcgcgcaactacgtgcgcggcgggtcgtcgtcgtcccgccagcagcagcagggaggaggaggaggaggaggaagtggcggcggcgccggtcagcaggtgatcgagctggagtgcctggacgatcaggtgctgcaggagatgctcaagggcggcgacgggaaaaaatagttgttagcgtatctgatcacaggtgcacgtgttgaaactgattatgaccaggcgatcgatcccatcttgtgcatgcggcctgccaaagttgctgggtcttctcatcgacctatatatatatgcttctcgatccatatatatatcataaatgcatgcagggtgcatgcatgtaccaagtttggaattataatgctcttggtgctgaattgaagtatactagtatatatagtgtgatccatgtattgaaaaggttgttttgcttaatcgcgtcatgattgcacacgtgcttgtttctgcttaaacaacccatatatatagccggctctggcctttgtcaagtctgcaatccttatacatcgttggtaattcatgcatgagttctatgtaactgcaatttagataaattgtagctaatataatagtc

SEQ ID NO: 30 - protein, 124 aa, Zea mays
MDDGGEPTKYRGVRRRPSGKFAAEIRDSSRQSVRMWLGTFDTAEEAARAYDRAAYAMRGQIAVLNFPAEARNYVRGGSSSSRQQQQGGGGGGGSGGGAGQQVIELECLDDQVLQEMLKGGDGKK

SEQ ID NO: 31 - DNA, 393 bp, Zea mays
atggaggacgacaagaaggagggcaagtaccgcggcgtgcggaagcggccgtggggcaagttcgccgcggagatccgggacccggagcgcggcggctcccgcgtctggctcggcaccttcgacaccgccgaggaggccgccagggcctacgaccgcgccgcattcgccatgaagggcgccacggccgtgctcaacttccccgccagcggaggatcgtcagctggcgcggctcccggcggccggaccagcggcggctcctcctcgtccaccacgtcggctccggccagcagggggagggcccgtgttcccgactcggagaaggtggagctggagtgcctcgacgacagggtcttggaagagctgctcgcggaagacaagtacaacaagaactaa

SEQ ID NO: 32 - protein, 130 aa, Zea mays
MEDDKKEGKYRGVRKRPWGKFAAEIRDPERGGSRVWLGTFDTAEEAARAYDRAAFAMKGATAVLNFPASGGSSAGAAPGGRTSGGSSSSTTSAPASRGRARVPDSEKVELECLDDRVLEELLAEDKYNKN

SEQ ID NO: 33 - DNA, 609 bp, Glycine max
tttctttctttctatactttttgtggttctgattattaagttctaagagaataacaatggagggtggaagatcatctgtttcaaatgggaattgtgaggttcggtatagagggattagaagaaggccatggggcaagtttgcagcagagattcgtgaccctacgaggaaagggacaaggatatggcttggaacatttgacactgcggaacaagctgctcgagcttatgatgctgctgcttttcattttcgtggtcatagagcaattctcaacttcccaaatgagtaccaatctcataatccaaactcttctttgcctatgcctctaattgtgcctcctccttcttattcttcttctttcacttctaattattctgctgatgataataaccaccttgtgagacctggagaaataatgcaaggtggtgatcttgatgacacttttgagttggagtacttggataataagttgctcgaggaactccttcagatgcaagataacagacacttctaaaagtaaaatataacacaagccagctatgttgtgttagtcactggcatgaaataaaatgcaaagaaatattgttgattttatttaatatattttgttt

SEQ ID NO: 34 - protein, 151 aa, Glycine max
MEGGRSSVSNGNCEVRYRGIRRRPWGKFAAEIRDPTRKGTRIWLGTFDTAEQAARAYDAAAFHFRGHRAILNFPNEYQSHNPNSSLPMPLIVPPPSYSSSFTSNYSADDNNHLVRPGEIMQGGDLDDTFELEYLDNKLLEELLQMQDNRHF

SEQ ID NO: 35 - DNA, 717 bp, Glycine max
ctaacacacataacaataacttagcaacattttttccttccttctttctttctttctatactttttgttgttaattctaagttctaagagaagaaaaatggagggtggaagatcatcagtttcaaatgggaatgttgaggttcgttatagagggattagaagaaggccatggggaaagtttgcagcagagattcgtgaccctacaaggaaaggaacaaggatatggcttggaacatttgacactgctgaacaagctgcacgagcttatgatgctgctgcttttcattttcgtggccacagagcaattctcaacttcccaaatgagtatcaatctcataatccaaactcttctttgcctatgcctctagctgtgtcagctcctccttcttattcttcttcttcttccacttctaattattccggtgatgataataataaccaccttgtgagaccagctttttctggagaaataatgcaaggtggtgatcatgatgatgatacttttgagttggagtacttcgataataagttgctcgaggaactccttcagatgcaagataacagacacttctaaaagtaaaatataacacaagccagctatgttgtgttagtcactggcatgaaataaaatgcaaagaaatattgttgattttatttaatatattttgtttgatttttttttttttttttgtagctgatcaaagttcttcgaaatga

SEQ ID NO: 36 - protein, 158 aa, Glycine max
MEGGRSSVSNGNVEVRYRGIRRRPWGKFAAEIRDPTRKGTRIWLGTFDTAEQAARAYDAAAFHFRGHRAILNFPNEYQSHNPNSSLPMPLAVSAPPSYSSSSSTSNYSGDDNNNHLVRPAFSGEIMQGGDHDDDTFELEYFDNKLLEELLQMQDNRHF

SEQ ID NO: 37 - DNA, 466 bp, Oryza sativa
gtgtgcgagcggttgcgtccgcatggaggacgacaagagtaaggaggggaaatcgtcgtcgtcgtaccgcggcgtgcggaagcggccgtggggcaagttcgcggcggagatccgcgacccggagcgcgggggagcccgcgtgtggctcggcacgttcgacaccgcggaggaggccgcgcgggcgtacgaccgcgccgcattcgccatgaagggcgccacggccatgctcaacttcccgggagatcatcatcacggcgccgcaagcaggatgaccagcaccggctcttcttcgtcctccttcaccacgcctcctccggcgaactcctccgcggcggcgggccgcggcggctccgatcggacgacggacaaggtggagctggagtgcctcgacgacaaggtcctggaggacctcctcgcggagaccaactatcgtgataagaactactagctagctagctactatggc

SEQ ID NO: 38 - protein, 141 aa, Oryza sativa
MEDDKSKEGKSSSSYRGVRKRPWGKFAAEIRDPERGGARVWLGTFDTAEEAARAYDRAAFAMKGATAMLNFPGDHHHGAASRMTSTGSSSSSFTTPPPANSSAAAGRGGSDRTTDKVELECLDDKVLEDLLAETNYRDKNY

SEQ ID NO: 39 - DNA, 696 bp, Arabidopsis thaliana
aatccatagatctcttattaaataacagtgctgaccaagctcttacaaagcaaaccaatctagaacaccaaagttaatggagagctcaaacaggagcagcaacaaccaatcacaagatgacaagcaagctcgtttccggggagttcgaagaaggccttggggaaagtttgcagcagagattcgagacccgtcgagaaacggtgcccgtctttggctcgggacatttgagaccgctgaggaggcagcaagggcttatgaccgagcagcctttaaccttaggggtcatctcgctatactcaacttccctaatgagtattatccacgtatggacgactactcgcttcgccctccttatgcttcttcttcttcgtcgtcgtcatcgggttcaacttctactaatgtgagtcgacaaaaccaaagagaagttttcgagtttgagtatttggacgataaggttcttgaagaacttcttgattcagaagaaaggaagagataatcacgattagttttgttttgatattttatgtggcactgttgtggctacctacgtgcattatgtgcatgtataggtcgcttgattagtactttataacatgcatgccacgaccataaattgtaagagaagacgtactttgcgttttcatgaaatatgaatgttagatggtttgagtacaaaaaaaaaaaaaaaaaaaaaaa

SEQ ID NO: 40 - protein, 139 aa, Arabidopsis thaliana
MESSNRSSNNQSQDDKQARFRGVRRRPWGKFAAEIRDPSRNGARLWLGTFETAEEAARAYDRAAFNLRGHLAILNFPNEYYPRMDDYSLRPPYASSSSSSSSGSTSTNVSRQNQREVFEFEYLDDKVLEELLDSEERKR

SEQ ID NO: 41 - protein, 65 aa, Arabidopsis thaliana
EQGKYRGVRRRPWGKYAAEIRDSRKHGERVWLGTFDTAEDAARAYDRAAYSMRGKAAILNFPHEY

SEQ ID NO: 42 - protein, 65 aa, Arabidopsis thaliana
EHGKYRGVRRRPWGKYAAEIRDSRKHGERVWLGTFDTAEEAARAYDQAAYSMRGQAAILNFPHEY

SEQ ID NO: 43 - protein, 65 aa, Arabidopsis thaliana
NEMKYRGVRKRPWGKYAAEIRDSARHGARVWLGTFNTAEDAARAYDRAAFGMRGQRAILNFPHEY

SEQ ID NO: 44 - protein, 65 aa, Oryza sativa
LVAKYRGVRRRPWGKFAAEIRDSSRHGVRVWLGTFDTAEEAARAYDRSAYSMRGANAVLNFPADA

SEQ ID NO: 45 - protein, 65 aa, Oryza sativa
TATKYRGVRRRPWGKFAAEIRDPERGGARVWLGTFDTAEEAARAYDRAAYAQRGAAAVLNFPAAA

SEQ ID NO: 46 - protein, 65 aa, Zea mays
EPTKYRGVRRRPWGKYAAEIRDSSRHGVRIWLGTFDTAEEAARAYDRSAYSMRGANAVLNFPEDA

SEQ ID NO: 47 - protein, 65 aa, Zea mays
EPTKYRGVRRRPWGKYAAEIRDSSRHGVRIWLGTFDTAEEAARAYDRSANSMRGANAVLNFPEDA

SEQ ID NO: 48 - protein, 65 aa, Oryza sativa
AASKYRGVRRRPWGKFAAEIRDPERGGSRVWLGTFDTAEEAARAYDRAAFAMKGAMAVLNFPGRT

SEQ ID NO: 49 - protein, 65 aa, Glycine max
EEPRYRGVRRRPWGKFAAEIRDPARHGARVWLGTFLTAEEAARAYDRAAYEMRGALAVLNFPNEY

SEQ ID NO: 50 - protein, 65 aa, Oryza sativa
ETTKYRGVRRRPSGKFAAEIRDSSRQSVRVWLGTFDTAEEAARAYDRAAYAMRGHLAVLNFPAEA

SEQ ID NO: 51 - protein, 65 aa, Zea mays
EPTKYRGVRRRPSGKFAAEIRDSSRQSVRMWLGTFDTAEEAARAYDRAAYAMRGQIAVLNFPAEA

SEQ ID NO: 52 - protein, 65 aa, Zea mays
KEGKYRGVRKRPWGKFAAEIRDPERGGSRVWLGTFDTAEEAARAYDRAAFAMKGATAVLNFPASG

SEQ ID NO: 53 - protein, 65 aa, Glycine max
CEVRYRGIRRRPWGKFAAEIRDPTRKGTRIWLGTFDTAEQAARAYDAAAFHFRGHRAILNFPNEY

SEQ ID NO: 54 - protein, 65 aa, Glycine max
VEVRYRGIRRRPWGKFAAEIRDPTRKGTRIWLGTFDTAEQAARAYDAAAFHFRGHRAILNFPNEY

SEQ ID NO: 55 - protein, 65 aa, Oryza sativa
SSSSYRGVRKRPWGKFAAEIRDPERGGARVWLGTFDTAEEAARAYDRAAFAMKGATAMLNFPGDH

SEQ ID NO: 56 - protein, 65 aa, Arabidopsis thaliana
KQARFRGVRRRPWGKFAAEIRDPSRNGARLWLGTFETAEEAARAYDRAAFNLRGHLAILNFPNEY

SEQ ID NO: 57 - protein, 16 aa, Arabidopsis thaliana
VFEFEYLDDSVLDELL

SEQ ID NO: 58 - protein, 16 aa, Arabidopsis thaliana
VFEFEYLDDSVLEELL

SEQ ID NO: 59 - protein, 16 aa, Arabidopsis thaliana
VIEFEYLDDSLLEELL

SEQ ID NO: 60 - protein, 16 aa, Oryza sativa
PIEFEYLDDHVLQEML

SEQ ID NO: 61 - protein, 16 aa, Oryza sativa
KIEFEYLDDKVLDDLL

SEQ ID NO: 62 - protein, 16 aa, Zea mays
VIELEYLDDEVLQEML

SEQ ID NO: 63 - protein, 16 aa, Zea mays
VIEFEYLDDEVLQEML

SEQ ID NO: 64 - protein, 16 aa, Oryza sativa
KVELVYLDDKVLDELL

SEQ ID NO: 65 - protein, 16 aa, Glycine max
VIEFECLDDKLLEDLL

SEQ ID NO: 66 - protein, 16 aa, Oryza sativa
VIELECLDDQVLQEML

SEQ ID NO: 67 - protein, 16 aa, Zea mays
VIELECLDDQVLQEML

SEQ ID NO: 68 - protein, 16 aa, Zea mays
KVELECLDDRVLEELL

SEQ ID NO: 69 - protein, 16 aa, Glycine max
TFELEYLDNKLLEELL

SEQ ID NO: 70 - protein, 16 aa, Glycine max
TFELEYFDNKLLEELL

SEQ ID NO: 71 - protein, 16 aa, Oryza sativa
KVELECLDDKVLEDLL

SEQ ID NO: 72 - protein, 16 aa, Arabidopsis thaliana
VFEFEYLDDKVLEELL

SEQ ID NO: 73 - DNA, 1013 bp, Glycine max
cacgaaatgtacggacaaagtagctatgagtccgatttggcccttttggactccattcgccgccacttactcggcgactccgaggaacacagattcggagccccgaatgttaattcgggtagcactccattgtactctcggagctccagtttcggcaggttgtacccttgcctgagtaacgattggggcgaacttcctcttatggaagacgattcagaagacatgcttctttatggtgttcttcgcgacgccgtgaacgtaggctgggtcccatctctcgacgcttcctcaccggagagtttctcgtcggctttcatgccgccggtgaccgtgaaatccgaaacggatctatttccggcaccggaaccgatttgtaaccctccggtggttcagggcccggcgccggcggtagttccggcgaaagggaagcactaccggggcgtgcggcagcgaccgtggggaaaattcgcagcggagatccgcgacccggctaaaaatggggctcgggtttggcttgggacttttgagacggctgaggacgccgcgctggcttacgatcgagccgcgtatcgaatgcgcggctcgcgggctttgttgaattttccgctccggattaattcgggcgagcccgaaccggttcgagttacggcgaagcgggcttcagcagaaccgtgttcttcgtcggagagtggatcttgggtgaagaagcggaagaaggtggtgggttgagaacggggcacgtggagagcagttgttggtgaagtaatttgtgatgctaaaaaggggtggaataaatgggttggcatgctcactcattgctcaagtgggactgtgggactgatcaaatctaaagctaaaaaagaaaacaaaccacatttggaaaaactgattagggtcgaggttctgtttggctttgtgaatacagttacaagatttcttattttttggttcaattctataataatatctgtaacatagttgggtagggcacccaccctgtgctgaactaagtt

SEQ ID NO: 74 - protein, 240 aa, Glycine max
MYGQSSYESDLALLDSIRRHLLGDSEEHRFGAPNVNSGSTPLYSRSSSFGRLYPCLSNDWGELPLMEDDSEDMLLYGVLRDAVNVGWVPSLDASSPESFSSAFMPPVTVKSETDLFPAPEPICNPPVVQGPAPAVVPAKGKHYRGVRQRPWGKFAAEIRDPAKNGARVWLGTFETAEDAALAYDRAAYRMRGSRALLNFPLRINSGEPEPVRVTAKRASAEPCSSSESGSWVKKRKKVVG

SEQ ID NO: 75 - DNA, 798 bp, Glycine max
ggagaccaccggagatatgtacggacggagtgattcttacgaatccgatttggcgcttctggattcgattcgccgccacttgctgggagagtccgaattgatattcggagccccgaatttcggttcgggtcggagctccagtttcagcagcttggactcgtgtttgagtgatgattggggagagcttccgtttaaggaggacgattcagaagatatggtgttgtacggcgttctccgtgacgcagttaatgtggggtgggtcccatccctcgatgccggctcgcccgagagcgtctcgtcgggttttccggcggtgaagctggagcctgatgtcatgccggcgttgattaatccgtgtccgcctccggcgccggcggtggaggagaagaaggttgttccgccgaaggggaagcactaccgcggcgtgcggcagcggccgtggggaaagttcgcggcggagatccgggacccggcgaagaacggggctagggtttggctggggacgtttgagacggcggaggacgcggcgttggcgtacgaccgcgccgcctaccggatgcgagggtcgagggcgctgctgaattttccgttgagggttaactccggcgagccagatccggtgagggtgacgtcgaagcggtcgtcgtcgccggaaagtatggcggcggcggcgccgaagagaaagaaagttatggtggtggggacggtgcaagagcaagtggggagtcaagtggtggagtgtacacgtggcgaacagttattggttagctgagagagattctaaaattggtattgtgt

SEQ ID NO: 76 - protein, 251 aa, Glycine max
MYGRSDSYESDLALLDSIRRHLLGESELIFGAPNFGSGRSSSFSSLDSCLSDDWGELPFKEDDSEDMVLYGVLRDAVNVGWVPSLDAGSPESVSSGFPAVKLEPDVMPALINPCPPPAPAVEEKKVVPPKGKHYRGVRQRPWGKFAAEIRDPAKNGARVWLGTFETAEDAALAYDRAAYRMRGSRALLNFPLRVNSGEPDPVRVTSKRSSSPESMAAAAPKRKKVMVVGTVQEQVGSQVVECTRGEQLLVS

SEQ ID NO: 77 - DNA, 964 bp, Arabidopsis thaliana
gaaatctcaacaagaaccaaaccaaacaacaaaaaaacattcttaataattatctttctgttatgtcgatgacggcggattctcaatctgattatgcttttcttgagtccatacgacgacacttactaggagaatcggagccgatactcagtgagtcgacagcgagttcggttactcaatcttgtgtaaccggtcagagcattaaaccggtgtacggacgaaaccctagctttagcaaactgtatccttgcttcaccgagagctggggagatttgccgttgaaagaaaacgattctgaggatatgttagtttacggtatcctcaacgacgcctttcacggcggttgggagccgtcttcttcgtcttccgacgaagatcgtagctctttcccgagtgttaagatcgagactccggagagtttcgcggcggtggattctgttccggtcaagaaggagaagacgagtcctgtttcggcggcggtgacggcggcgaagggaaagcattatagaggagtgagacaaaggccgtgggggaaatttgcggcggagattagagatccggcgaagaacggagctagggtttggttaggaacgtttgagacggcggaggacgcggcgttggcttacgacagagctgctttcaggatgcgtggttcccgcgctttgttgaattttccgttgagagttaattcaggagaacccgacccggttcgaatcaagtccaagagatcttctttttcttcttctaacgagaacggagctccgaagaagaggagaacggtggccgccggtggtggaatggataagggattgacggtgaagtgcgaggttgttgaagtggcacgtggcgatcgtttattggttttataattttgatttttctttgttggatgattatatgattcttcaaaaaagaagaacgttaataaaaaaattcgtttattattaaaaaaaaaaaaaaaaaa

SEQ ID NO: 78 - protein, 268 aa, Arabidopsis thaliana
MSMTADSQSDYAFLESIRRHLLGESEPILSESTASSVTQSCVTGQSIKPVYGRNPSFSKLYPCFTESWGDLPLKENDSEDMLVYGILNDAFHGGWEPSSSSSDEDRSSFPSVKIETPESFAAVDSVPVKKEKTSPVSAAVTAAKGKHYRGVRQRPWGKFAAEIRDPAKNGARVWLGTFETAEDAALAYDRAAFRMRGSRALLNFPLRVNSGEPDPVRIKSKRSSFSSSNENGAPKKRRTVAAGGGMDKGLTVKCEVVEVARGDRLLVL

SEQ ID NO: 79 - DNA, 783 bp, Brassica oleracea
caaaaatataatggcggcagaatccgactacattttgcttgagtcgataagacgacacttactaggagaatcggagtcgtggctcagtgagtcgacggcgagttcggtggttcaatctggtacgacggccaaaccggtgtacggaagaaaccctagcttcagcaagttgtacccttgcttcactgagagctggggacacttgccgttgaaagaaaacgacacggaggacatgttagtctacggtatcctcaacgacgcgtttcacggcggatgggaaccgtcgtcttcatcctccgacgaagaccagagctctaattttccgaaggttaaaaccgagaacttcacggtggtcgatcatgttccggcgaagaaggcgagtccggttaaggctccggagaaggggaagcattacagaggagtgaggcagaggccgtgggggaagttcgcggcggagataagggatccggcgaagaacggagctagggtttggttggggacgtttgagacggcggaagatgcagcgttggcttacgacagagctgctttcaggatgcgtggttcccgcgctcttttgaattttcctttgagggttaactcaggtgaacctgacccggttcgggttaagtcaaagagaggttcttcctctgaaatcggaggttcgaagcggagaagaacggtggcttctgtaaacggcggcggtcaaggaacagatatggggttgatggtcaagtgtgaggtggttgaagtgagacgtgacgatcatttacttgtcttatagttttt

SEQ ID NO: 80 - protein, 255 aa, Brassica oleracea
MAAESDYILLESIRRHLLGESESWLSESTASSVVQSGTTAKPVYGRNPSFSKLYPCFTESWGHLPLKENDTEDMLVYGILNDAFHGGWEPSSSSSDEDQSSNFPKVKTENFTVVDHVPAKKASPVKAPEKGKHYRGVRQRPWGKFAAEIRDPAKNGARVWLGTFETAEDAALAYDRAAFRMRGSRALLNFPLRVNSGEPDPVRVKSKRGSSSEIGGSKRRRTVASVNGGGQGTDMGLMVKCEVVEVRRDDHLLVL

SEQ ID NO: 81 - DNA, 885 bp, Zea mays
atgctgcttaacccggcgtgcgaggcggcagcgccgatggacagcatccggcatcacctcctggacgagccggcggcggcggcgaccgcgagcgcggctccgcggccggtgtactgccgcagcacgagcttcggcagcctagtggcggaccaatggagcgagtcgctcccgttccgccccgacgacgccgacgacatggtcgtcttcggcgcgctccgcgacgccttttcccagggctggctccccgacggctccttcgccgccgtgaagcccgagcccctggcgttcccggactccccctacgagcgcggatcctatccctgccttggtggcttccttctcgcggaggggcctgagacgccgaccgaggcggcgacgacgcccgggagcgaggaggaggccgcggcggcggtgtccagggggaagcactaccgcggggtgaggcagcggccgtggggcaagttcgcggcggagatccgggacccggccaagaacggcgcgcgcgtgtggctgggcacgtacgacagcgccgaggacgccgccgtggcctacgaccgcgccgcgtaccgcatgcgcggctcccgcgcgctcctcaacttcccgctccgcatcggctccgagatcgccgcggcggccgccgccgtcgcggccactgcccctgccgcgggagacaagcgggcgtccccagagccgaccgcgagctccgactcctccccttcggcctcctctgcgacaccgaagcggaggaagagaggcgaggccgctgccgcgaccatggccatggcccttgtgccgcccccgccggcggcgcaggcgcccgtccagctgaccctcccggcccgtccgtggttcgccgccggccccgtccagcagctagtgagctaa

SEQ ID NO: 82 - protein, 294 aa, Zea mays
MLLNPACEAAAPMDSIRHHLLDEPAAAATASAAPRPVYCRSTSFGSLVADQWSESLPFRPDDADDMVVFGALRDAFSQGWLPDGSFAAVKPEPLAFPDSPYERGSYPCLGGFLLAEGPETPTEAATTPGSEEEAAAAVSRGKHYRGVRQRPWGKFAAEIRDPAKNGARVWLGTYDSAEDAAVAYDRAAYRMRGSRALLNFPLRIGSEIAAAAAAVAATAPAAGDKRASPEPTASSDSSPSASSATPKRRKRGEAAAATMAMALVPPPPAAQAPVQLTLPARPWFAAGPVQQLVS

SEQ ID NO: 83 - DNA, 959 bp, Oryza sativa
ccaaattcacgggataattcaaagatgctgcttaatccggcgtcgagagaggtggccgcgctggacagcatccggcaccacctcctggaggaggaggaggagacgccggcgacggcgccggcgccgacgcggcggccggtgtactgccggagctcaagcttcggcagcctcgtggccgaccagtggagcgagtcgctgccgttccggcccaacgacgccgaggacatggtcgtgtacggcgccctccgcgacgccttctcctccggctggctccccgacggctcattcgccgccgtcaagccggagtcgcaggactcctacgacgggtcctccatcggcagcttcctcgcgtcgtcgtcgtccgaggcggggacgcccggggaggtgacgtcgacggaggcgacggtgacgccggggatcagggagggcgagggcgaggccgtggcggtggcgtcgagggggaagcactaccgcggggtgaggcagcggccgtggggcaagttcgcggcggagatcagggacccggccaagaacggcgcgcgcgtgtggctcggcacgttcgactccgccgaggaggccgccgtggcgtacgaccgcgccgcctaccgcatgcgcggctcccgcgcgctcctcaacttcccgctccgcatcggctccgagatcgccgccgcggccgccgccgccgccgcgggcaacaagcggccatatcccgacccggcgagctccggctcttcttccccttcatcctcttcctcctcgtcgtcgtcttcctcctccgggtcaccgaagcggaggaagagaggcgaggccgcggccgcgtccatggccatggcactggttccaccaccgccaccaccggcgcaggcaccggtgcagctcgccctcccggcccagccatggttcgccgccggtccgatccagcagctggtgagctaagtggcgatgtggtagtggtagtg

SEQ ID NO: 84 - protein, 303 aa, Oryza sativa
MLLNPASREVAALDSIRHHLLEEEEETPATAPAPTRRPVYCRSSSFGSLVADQWSESLPFRPNDAEDMVVYGALRDAFSSGWLPDGSFAAVKPESQDSYDGSSIGSFLASSSSEAGTPGEVTSTEATVTPGIREGEGEAVAVASRGKHYRGVRQRPWGKFAAEIRDPAKNGARVWLGTFDSAEEAAVAYDRAAYRMRGSRALLNFPLRIGSEIAAAAAAAAAGNKRPYPDPASSGSSSPSSSSSSSSSSSSGSPKRRKRGEAAAASMAMALVPPPPPPAQAPVQLALPAQPWFAAGPIQQLVS

SEQ ID NO: 85 - DNA, 957 bp, Oryza sativa
atgacggcgcgaagcatgttgcggaaccacccggaggcgtcggtgctcgacaccatccggcagcacctgctggaggagccgcgcggcggcggcggtggcgaggcggcggaggcgagcttcgggagcctggtggccgacatgtggagcgactcgctgccgttccgcgacgacgacgccgacgacatggtggtgttcggcgcgatgcgggacgcgttctcgtgcgggtggctgcccgacggcgtgttcgcggaggtgaagccggagcccctgctctcgccggactcgtcgtcgtacgacgggtcctcttgctgcttcggcttcgcggacgtgtcggagccggtgacgccgagcgacgcggcgtcgggggcggcagaagcggcggccgcggcggcggcggcgacggcggagcacgggaaggaggaggaggccgcggctgcggtggcgagggggaagcactacaggggggtgaggcagcggccgtggggcaagttcgcggcggagatccgggaccccgccaagaacggcgcgcgcgtgtggctcggcacgttcgacaccgccgaggacgccgccctggcgtacgaccgcgccgcctaccgcatgcgtggctcccgcgcgctcctcaacttcccgctccgcatcggctcggagatcgcagccgccgccgccgccgcagcggcagcggcagccggcgacaagcggccgtcgccggagccggcgacctcggagtcgtccttctcctcctcatcctcctgcaccaccaccaccacctcctcctcaacctcctcctccggctccccgaaacggagaaagagaggcgaggccgcggccgcgtccatgtccatgcccctggtgcccccgccttcccagctgaactggccggtgcaggcatggtaccccgccgccgcaccggtcgagcaggtggcgatcaccccgcgcgtggagcagctcgtcatctaa

SEQ ID NO: 86 - protein, 318 aa, Oryza sativa
MTARSMLRNHPEASVLDTIRQHLLEEPRGGGGGEAAEASFGSLVADMWSDSLPFRDDDADDMVVFGAMRDAFSCGWLPDGVFAEVKPEPLLSPDSSSYDGSSCCFGFADVSEPVTPSDAASGAAEAAAAAAAATAEHGKEEEAAAAVARGKHYRGVRQRPWGKFAAEIRDPAKNGARVWLGTFDTAEDAALAYDRAAYRMRGSRALLNFPLRIGSEIAAAAAAAAAAAAGDKRPSPEPATSESSFSSSSSCTTTTTSSSTSSSGSPKRRKRGEAAAASMSMPLVPPPSQLNWPVQAWYPAAAPVEQVAITPRVEQLVI

SEQ ID NO: 87 - DNA, 839 bp, Zea mays
caggatgctgctgaacccggcgtcagaggcgtcggtgctagacaccatccggcagcacctcctcgaggagccagccgacgagagcttcgggagcctggtggcggaccagtggagcggctcgctcccgttccgcaccgacgacgccgacgacatggtggtgttcggggcgctgcaggacgccttcgcctacggctggctgcccgacggctcattcgtgcacgtgaagcccgagccggtgcggtcccccgactcgtcctcctacccctgctcctacgacggctcaccctgcttcggcctcctggacccggagccgccgctgacgcccggcaccaccacgcccagtagtagggggcaggaggaggccgcggcggccatggcccggggcaagcactacaggggggtgaggcagcgcccgtggggcaagttcgcggcggagatcagggaccccgccaggaacggcgcgcgcgtctggctcggcacgtacgacaccgccgaggacgccgcgctcgcctacgaccgcgccgcctaccgcatgcgcggctcgcgcgcgctcctcaacttcccgctccgcatcggctccggggacaagcgcccgtcgccggcgccgcccgagcccgccacctcctcggactcctcctcgtcttcggccagcggctcgcacaagaggcggaagcgaggcgaggccgcggctgccaacatggccatggcgctggtgcccccgccctcccagcttaaccggccggcccagccgtggttccctgccgcgccggtcgagcaggcggcgatggctccgcgcgtggagcagatcgtcgtctagtctagccatgcgccggagaaat

SEQ ID NO: 88 - protein, 270 aa, Zea mays
MLLNPASEASVLDTIRQHLLEEPADESFGSLVADQWSGSLPFRTDDADDMVVFGALQDAFAYGWLPDGSFVHVKPEPVRSPDSSSYPCSYDGSPCFGLLDPEPPLTPGTTTPSSRGQEEAAAAMARGKHYRGVRQRPWGKFAAEIRDPARNGARVWLGTYDTAEDAALAYDRAAYRMRGSRALLNFPLRIGSGDKRPSPAPPEPATSSDSSSSSASGSHKRRKRGEAAAANMAMALVPPPSQLNRPAQPWFPAAPVEQAAMAPRVEQIVV

SEQ ID NO: 89 - DNA, 913 bp, Arabidopsis thaliana
gataaatcaatcaacaaaacaaaaaaaactctatagttagtttctctgaaaatgtacggacagtgcaatatagaatccgactacgctttgttggagtcgataacacgtcacttgctaggaggaggaggagagaacgagctgcgactcaatgagtcaacaccgagttcgtgtttcacagagagttggggaggtttgccattgaaagagaatgattcagaggacatgttggtgtacggactcctcaaagatgccttccattttgacacgtcatcatcggacttgagctgtctttttgattttccggcggttaaagtcgagccaactgagaactttacggcgatggaggagaaaccaaagaaagcgataccggttacggagacggcagtgaaggcgaagcattacagaggagtgaggcagagaccgtgggggaaattcgcggcggagatacgtgatccggcgaagaatggagctagggtttggttagggacgtttgagacggcggaagatgcggctttagcttacgatatagctgcttttaggatgcgtggttcccgcgctttattgaattttccgttgagggttaattccggtgaacctgacccggttcggatcacgtctaagagatcttcttcgtcgtcgtcgtcgtcgtcctcttctacgtcgtcgtctgaaaacgggaagttgaaacgaaggagaaaagcagagaatctgacgtcggaggtggtgcaggtgaagtgtgaggttggtgatgagacacgtgttgatgagttattggtttcataagtttgatcttgtgtgttttgtagttgaatagttttgctataaatgttgaggcaccaagtaaaagtgttcccgtgatgtaaattagttactaaacagagccatatatcttcaatcaaaaaaaaaaaaaaaa

SEQ ID NO: 90 - protein, 243 aa, Arabidopsis thaliana
MYGQCNIESDYALLESITRHLLGGGGENELRLNESTPSSCFTESWGGLPLKENDSEDMLVYGLLKDAFHFDTSSSDLSCLFDFPAVKVEPTENFTAMEEKPKKAIPVTETAVKAKHYRGVRQRPWGKFAAEIRDPAKNGARVWLGTFETAEDAALAYDIAAFRMRGSRALLNFPLRVNSGEPDPVRITSKRSSSSSSSSSSSTSSSENGKLKRRRKAENLTSEVVQVKCEVGDETRVDELLVS

SEQ ID NO: 91 - DNA, 703 bp, Brassica oleracea
tctgtaataataatgtacggacatggcgagataaccacggcagcagaatcagattacgctttgctggagtcaatacgacgtcacttgctaggtggagacaacgagttacgattcagtgagtcaataccgagttcatgtttcactcagagttggggagacttgccattgaaagagaacgactccgaggatatgttagtgtacagtgtcctcaacgacgccttcaacggagcctttgaaacgtcgtcgccgtcgtcggacttgagctgtctcagcgattttaacgattttccggcggttaaaatggaaacttcggagaacttagcagcggaggcggaaaaaatgaaggcggtggcggcgccgccgtcaaagggaaagcattacagaggggtgagacagaggccgtgggggaaattcgcggcggagatacgtgatccggcgaaaaaaggagcgagggaatggttagggacgtttgagacggcggaagatgcagctttggcttacgatagagctgcttttaggatgcgtggttcccgcgctttgttgaattttccgttgagggttaactccggtgaacctgacccggtaaggatcaagtcaaagaggtcttataagtcttcttcgtcgtcctcttctgaaaacgggaagccgaagcagaggagaagaacagagaacgtgccatagttcaggtgaagggcgatgttgt

SEQ ID NO: 92 - protein, 222 aa, Brassica oleracea
MYGHGEITTAAESDYALLESIRRHLLGGDNELRFSESIPSSCFTQSWGDLPLKENDSEDMLVYSVLNDAFNGAFETSSPSSDLSCLSDFNDFPAVKMETSENLAAEAEKMKAVAAPPSKGKHYRGVRQRPWGKFAAEIRDPAKKGAREWLGTFETAEDAALAYDRAAFRMRGSRALLNFPLRVNSGEPDPVRIKSKRSYKSSSSSSSENGKPKQRRRTENVP

SEQ ID NO: 93 - DNA, 1225 bp, Triticum aestivum
cccacgcgtccgccaagagcgaactgagatcatcctaggaccaggcgcgaccacacaggacaagatgctgctgcttaatccggcgtccgaggcggcggcggcggcgctggacagcatccggcagcagctcctggaggagccaatggcgccggcgcggccggcgtactgccggagcgcgagcttcggcagcctggtggcggaccagtggagcgagtctctcccgttccggcccaacgacgccgacgacatggtcgtctacggtgccctccgcgacgccttctcctgcggctggctccccgacggctccttcgcggccgtcaagcccgagcccctgccctcccccgactcctacgacggctgctgcctcggcagcttcctcgcgtcgccgcccgggctggacgcgccgtgggcggaggaggccgaggtcgcagcgacggcgtcaagggggaagcacttcagaggcgtgaggcagcggccgtggggcaagttcgcggcggagatccgggacccagccaagaacggcgcgcgcgtgtggctcggcaccttcgacagcgccgaggacgccgctgtggcgtacgaccgcgccgcctaccgcatgcgcggctcccgcgcgctcctcaacttcccgctccgcatcggctcggagatcgccgcagccgcgggtcagaagcgtccgtctccccagccagcgagccccgactctcctcctccctcctccagcgcacccgggtcgtcgaagcggagaaagagaggcgaggccgcagcagagtccatgtccatggctctggtgccgcccccgccggtgcaggctccggtccagctgaccctcccagtccagccgtggctcgccaccggcgccgtccagcagctagtgagctgaagcggcgaaagcaacaagtgatcgttctcatgaccgatggccattagttcttccttcatggcttcatgtgttgagcccatggaggaacagagcatcaagatggcgtcaatggcgtaatgcgtcgctcgaagaaaccttgatcagttggaggcaattacgcgccacgccattgtgaaatttgtgtggctccgtgtgaaacttgtcgctagggttagtggcgttggcacagtagcaagtgggtgcagtggaatcccgaagctggtttgtaagaggtggtgagggtgcaggtgcaaaagttgcacagaccttctcctctccaatggagaatcttctttgttaaaaaaa

SEQ ID NO: 94 - protein, 271 aa, Triticum aestivum
MLLLNPASEAAAAALDSIRQQLLEEPMAPARPAYCRSASFGSLVADQWSESLPFRPNDADDMVVYGALRDAFSCGWLPDGSFAAVKPEPLPSPDSYDGCCLGSFLASPPGLDAPWAEEAEVAATASRGKHFRGVRQRPWGKFAAEIRDPAKNGARVWLGTFDSAEDAAVAYDRAAYRMRGSRALLNFPLRIGSEIAAAAGQKRPSPQPASPDSPPPSSSAPGSSKRRKRGEAAAESMSMALVPPPPVQAPVQLTLPVQPWLATGAVQQLVS

SEQ ID NO: 95 - DNA, 913 bp, Arabidopsis thaliana
agaaaacatctctcactctctaaaatacacactctcatcaaaaaccttctcttcggttcagaagcattcaagaatccattatgagctcatctgattccgttaataacggcgttaactcacggatgtacttccgtaacccgagtttcagcaacgttatcttaaacgataactggagcgacttgccgttaagtgtcgacgattctcaagacatggctatttacaacactctccgtgatgccgttagctccggctggacaccctccgttcctcccgttacctctccggcggaggaaaataagcctccggcgacgaaggcgagtggctcacacgcgccgaggcagaaggggatgcagtacagaggagtgaggaggaggccgtgggggaaattcgcggcggagattagggatccgaagaagaacggagctagggtttggctcgggacttacgagacgccggaggacgcggcggtggcgtacgaccgagcggcgtttcagctcagaggatcgaaagctaagctgaattttccgcatttgattggttcttgtaagtatgagccggttaggattaggcctcgccgtcgctcgccggaaccgtcagtctccgatcagttaacgtcggagcagaagagggaaagccacgtggatgacggcgagtctagtttggttgtaccggagttggatttcacggtggatcagttttacttcgatggtagtttattaatggaccaatcagaatgttcttattctgataatcggatataattagttttaagattaagcaaaatttgtccaacgagttttgctgtatgaaatatctatcgatgactcaacaggttttgatcatgatcatatgtaatgtgatggaaattaaatattgacgtttgtttttttgttgtaaaaaaaaaaaaaaaaaa

SEQ ID NO: 96 - protein, 226 aa, Arabidopsis thaliana
MSSSDSVNNGVNSRMYFRNPSFSNVILNDNWSDLPLSVDDSQDMAIYNTLRDAVSSGWTPSVPPVTSPAEENKPPATKASGSHAPRQKGMQYRGVRRRPWGKFAAEIRDPKKNGARVWLGTYETPEDAAVAYDRAAFQLRGSKAKLNFPHLIGSCKYEPVRIRPRRRSPEPSVSDQLTSEQKRESHVDDGESSLVVPELDFTVDQFYFDGSLLMDQSECSYSDNRI

SEQ ID NO: 97 - protein, 65 aa, Solanum lycopersicum
KGRHYRGVRQRPWGKFAAEIRDPAKNGARVWLGTYETAEEAAIAYDKAAYRMRGSKAHLNFPHRI

SEQ ID NO: 98 - protein, 65 aa, Glycine max
KGKHYRGVRQRPWGKFAAEIRDPAKNGARVWLGTFETAEDAALAYDRAAYRMRGSRALLNFPLRI

SEQ ID NO: 99 - protein, 65 aa, Glycine max
KGKHYRGVRQRPWGKFAAEIRDPAKNGARVWLGTFETAEDAALAYDRAAYRMRGSRALLNFPLRV

SEQ ID NO: 100 - protein, 65 aa, Arabidopsis thaliana
KGKHYRGVRQRPWGKFAAEIRDPAKNGARVWLGTFETAEDAALAYDRAAFRMRGSRALLNFPLRV

SEQ ID NO: 101 - protein, 65 aa, Brassica oleracea; identical to SEQ ID NO: 100

SEQ ID NO: 102 - protein, 65 aa, Zea mays
RGKHYRGVRQRPWGKFAAEIRDPAKNGARVWLGTYDSAEDAAVAYDRAAYRMRGSRALLNFPLRI

SEQ ID NO: 103 - protein, 65 aa, Oryza sativa
RGKHYRGVRQRPWGKFAAEIRDPAKNGARVWLGTFDSAEEAAVAYDRAAYRMRGSRALLNFPLRI

SEQ ID NO: 104 - protein, 65 aa, Oryza sativa
RGKHYRGVRQRPWGKFAAEIRDPAKNGARVWLGTFDTAEDAALAYDRAAYRMRGSRALLNFPLRI

SEQ ID NO: 105 - protein, 65 aa, Zea mays
RGKHYRGVRQRPWGKFAAEIRDPARNGARVWLGTYDTAEDAALAYDRAAYRMRGSRALLNFPLRI

SEQ ID NO: 106 - protein, 65 aa, Arabidopsis thaliana
KAKHYRGVRQRPWGKFAAEIRDPAKNGARVWLGTFETAEDAALAYDIAAFRMRGSRALLNFPLRV

SEQ ID NO: 107 - protein, 65 aa, Brassica oleracea
KGKHYRGVRQRPWGKFAAEIRDPAKKGAREWLGTFETAEDAALAYDRAAFRMRGSRALLNFPLRV

SEQ ID NO: 108 - protein, 65 aa, Triticum aestivum
RGKHFRGVRQRPWGKFAAEIRDPAKNGARVWLGTFDSAEDAAVAYDRAAYRMRGSRALLNFPLRI

SEQ ID NO: 109 - protein, 65 aa, Arabidopsis thaliana
KGMQYRGVRRRPWGKFAAEIRDPKKNGARVWLGTYETPEDAAVAYDRAAFQLRGSKAKLNFPHLI

SEQ ID NO: 110 - DNA, 759 bp, Arabidopsis thaliana
gtttgtcttttatcaatggaaagagaacaagaagagtctacgatgagaaagagaaggcagccacctcaagaagaagtgcctaaccacgtggctacaaggaagccgtacagagggatacggaggaggaagtggggcaagtgggtggctgagattcgtgagcctaacaaacgctcacggctttggcttggctcttacacaaccgatatcgccgccgctagagcctacgacgtggccgtcttctacctccgtggcccctccgcacgtctcaacttccctgatcttctcttgcaagaagaggaccatctctcagccgccaccaccgctgacatgcccgcagctcttataagggaaaaagcggcggaggtcggcgccagagtcgacgctcttctagcttctgccgctccttcgatggctcactccactccgccggtaataaaacccgacttgaatcaaatacccgaatccggagatatatagtcaatttatatacatgtagtttgttttgtttgattagaagattacatttacatacaagatacacatagatactggaaaatataggtatgtatacattcataaattatcttatgtatcaaagaattttatagattctgattagctttttgtttttgtttttgataagaactctgattagttgtccggagacaaaaccggctaagagcaatccatgagaagctagcgagtgttttttagttcaagttgtaatataaatgcatattaattctttagtaattttgt

SEQ ID NO: 111 - protein, 153 aa, Arabidopsis thaliana
MEREQEESTMRKRRQPPQEEVPNHVATRKPYRGIRRRKWGKWVAEIREPNKRSRLWLGSYTTDIAAARAYDVAVFYLRGPSARLNFPDLLLQEEDHLSAATTADMPAALIREKAAEVGARVDALLASAAPSMAHSTPPVIKPDLNQIPESGDI

SEQ ID NO: 112 - DNA, 1699 bp, Arabidopsis thaliana
ttttttttttgcaatctccccctaatctgttgtttctcgcttcttcttctgttaatcatctgtctttcaaaaagaaagaaaaaagaaaaattcgatttctgggtttgtttttgtcatacagaaaaaaatcaagcttatgaatttgtgtttaattttttgttttaatttgaaaggcaggttttttcagaacgagatcgttttttcaaatttcttctgattttacctctttttttcttcttagattttagtgaatcgagggtgaaatttttgattccctcttttcggatctacacagaggttgcttatttcaaaccttttagatccatttttttttaattttctcggaaaaatccctgtttctttacttttttataagtctcaggttcaattttttcggattcaaatttttattttaaatggcagctgctatgaatttgtacacttgtagcagatcgtttcaagactctggtggtgaactcatggacgcgcttgtaccttttatcaaaagcgtttccgattctccttcttcttcttctgcagcgtctgcgtctgcgtttcttcacccctctgcgttttctctccctcctctccccggttattacccggattcaacgttcttgacccaaccgttttcatacgggtcggatcttcaacaaaccgggtcattaatcggactcaacaacctctcttcttctcagatccaccagatccagtctcagatccatcatcctcttcctccgacgcatcacaacaacaacaactctttctcgaatcttctcagcccaaagccgttactgatgaagcaatctggagtcgctggatcttgtttcgcttacggttcaggtgttccttcgaagccgacgaagctttacagaggtgtgaggcaacgtcactggggaaaatgggtggctgagatccgtttgccgagaaatcggactcgtctctggcttgggacttttgacacggcggaggaagctgcgttggcctatgataaggcggcgtacaagctgcgcggcgatttcgcccggcttaacttccctaacctacgtcataacggatttcacatcggaggcgatttcggtgaatataaacctcttcactcctcagtcgacgctaagcttgaagctatttgtaaaagcatggcggagactcagaaacaggacaaatcgacgaaatcatcgaagaaacgtgagaagaaggtttcgtcgccagatctatcggagaaagtgaaggcggaggagaattcggtttcgatcggtggatctccaccggtgacggagtttgaagagtccaccgctggatcttcgccgttgtcggacttgacgttcgctgacccggaggagccgccgcagtggaacgagacgttctcgttggagaagtatccgtcgtacgagatcgattgggattcgattctagcttaggggcaaaataggaaattcagccgcttgcaatggagtttttgtgaaattgcatgactggcccaagagtaattaattaaatatggattagtgttaaatttcgtatgttaatatttgtattatggtttgtattagtctctctgtgtcggtccagcttgcggttttttgtcaggctcgaccatgccacagttttcattttatgtaatctttttttcttttgtcttatgtaatttgtagcttcagtttcttcatctataatgcaattttattatgattatgtg

SEQ ID NO: 113 - protein, 334 aa, Arabidopsis thaliana
MAAAMNLYTCSRSFQDSGGELMDALVPFIKSVSDSPSSSSAASASAFLHPSAFSLPPLPGYYPDSTFLTQPFSYGSDLQQTGSLIGLNNLSSSQIHQIQSQIHHPLPPTHHNNNNSFSNLLSPKPLLMKQSGVAGSCFAYGSGVPSKPTKLYRGVRQRHWGKWVAEIRLPRNRTRLWLGTFDTAEEAALAYDKAAYKLRGDFARLNFPNLRHNGFHIGGDFGEYKPLHSSVDAKLEAICKSMAETQKQDKSTKSSKKREKKVSSPDLSEKVKAEENSVSIGGSPPVTEFEESTAGSSPLSDLTFADPEEPPQWNETFSLEKYPSYEIDWDSILA

SEQ ID NO: 114 - DNA, 831 bp, Arabidopsis thaliana
gtgtcggtgaattttttgaaacttcttctcttttgcggtttcgtgttccactcctctcttcttggcccacgtgttcatcaatctctccctccgcatgtaatcgcttcgccgtcaatatcacatctttcttcttctttatctttaaaatctctttagatcgattcttttgtggattcttgaaatctccggagaaaaccactatggagacggcgactgaagtggccacggtggtgtcaactccggcggttacggttgcggcggtggcgacgaggaagagagataagccgtataaagggataaggatgaggaagtgggggaagtgggtggcggagataagagagcctaataaaaggtcaaggatctggcttggctcttactctactcctgaagcggcggcgcgtgcttacgacacggcggtgttttatctccgaggtccttctgctcggcttaacttcccggagcttttagccggagtgacggtgacgggaggaggcggaggaggagtgaacggtggtggagatatgtcggcggcgtatataaggagaaaagcggcggaggttggagcacaagtggatgcgttagaagcggcgggggcgggagggaatcgtcatcatcatcatcatcaacatcaacgtggtaatcatgattacgtagataatcatagtgattatcgtattaatgatgatcttatggagtgtagtagtaaagaagggtttaagaggtgtaatggatcgttggaacgggttgatttaaacaaattacccgatccggaaacttcagatgacgattaggaaagcaaaaaatagaaacaaaaaaaaaaaaaaaaaaaaa

SEQ ID NO: 115 - protein, 196 aa, Arabidopsis thaliana
METATEVATVVSTPAVTVAAVATRKRDKPYKGIRMRKWGKWVAEIREPNKRSRIWLGSYSTPEAAARAYDTAVFYLRGPSARLNFPELLAGVTVTGGGGGGVNGGGDMSAAYIRRKAAEVGAQVDALEAAGAGGNRHHHHHQHQRGNHDYVDNHSDYRINDDLMECSSKEGFKRCNGSLERVDLNKLPDPETSDDD

SEQ ID NO: 116 - DNA, 1015 bp, Arabidopsis thaliana
ctgtctctcactttccttcattatttactcattgcccaaaataattcatttatcatatcctcaaacttttttttttctatacctcgaaatccaaaaaaataaatacattggtttagtgtggcattgatgtttttggtataaagctcttcaccaatgatagcttcagagagtaccaagagctgggaagctagcgcagtcagacaagagaatgaagaagagaagaagaaaccggttaaagattccggtaagcatccggtttatcggggtgtccgaaagaggaactggggaaaatgggtgtccgagatacgtgaacctaggaaaaaatcccgaatatggctaggaacgtttccttccccggagatggcggcgcgtgcacacgacgtagccgctcttagcatcaaaggagcctccgctatactcaatttccctgacctagccggctctttcccacgccctagctcgcttagccctcgagacatccaggtcgcggctctcaaagccgcacacatggagacctcacagtctttttcttcttcttcttctttaacgttttcatcttcacagtcttcttcttcgctagagtctctcgtgtcttcctccgcgaccggctccgaggagctaggggagattgtagagctcccaagtttgggatcgagctatgatggtttgactcagctaggtaacgagtttatattctctgactccgcagacttatggccttatccaccgcaatggtcagaaggtgattaccaaatgattcctgcctcgttatcacaagattgggatcttcaaggactgtataattattaagtcataatcataaaaatatactagtaatgctgtgtttaataattactttttaatgacccctttattttgtatagggcggctttaggtttatttgtctttgaatcttcttttctcaatttgtgggtgtgagagagctcgatatatgaatacttgtacatacttctcataacatgtgttttttttttcttaataaatgtggaaactt

SEQ ID NO: 117 - protein, 218 aa, Arabidopsis thaliana
MIASESTKSWEASAVRQENEEEKKKPVKDSGKHPVYRGVRKRNWGKWVSEIREPRKKSRIWLGTFPSPEMAARAHDVAALSIKGASAILNFPDLAGSFPRPSSLSPRDIQVAALKAAHMETSQSFSSSSSLTFSSSQSSSSLESLVSSSATGSEELGEIVELPSLGSSYDGLTQLGNEFIFSDSADLWPYPPQWSEGDYQMIPASLSQDWDLQGLYNY

SEQ ID NO: 118 - DNA, 1003 bp, Arabidopsis thaliana
tgtggaggaatattaatacagcccacttcacatctatttttgtgcaaccatctctctaaagcttcttctctcataacaatggcaagacaaatcaacatagagagtagtgtttctcaagttacctttatctcctccgccatccccgccgtatcttcctcctcctccatcaccgcttccgcctcattgtcctcttcacctactacatcttcctcttcttcgtcatcaacaaattctaacttcattgaggaagacaactctaaaagaaaagcatctcgaagatcattgtcatcgttagtctccgttgaagacgatgatgatcaaaacggtggaggtgggaaacggcgaaagaccaacggtggagataaacatccgacgtatagaggagtgaggatgaggagttggggaaaatgggtgtcggagattagagagccgagaaagaaatcaagaatctggctcgggacttatccaacggctgagatggcagctcgagctcatgacgtagcggctttagccattaaaggtacaacggcttacctcaattttcccaagttagccggcgagcttcctcgtccagtcacaaattctcctaaagacattcaagccgccgcctctttagcggccgttaactggcaagattcggtcaacgatgtgagtaattctgaagtggctgaaatagttgaagccgagccgagtcgagccgtggtggctcagttgttttcttcggacacaagcacgacgacgacgactcagagtcaagagtattcggaagcttcgtgtgcttcgacttcggcgtgtacggacaaagacagtgaggaagagaagctgtttgatttgccggatttgtttaccgatgagaatgagatgatgatacgaaacgatgcgttttgctactactcgtccacgtggcagctttgtggagccgatgctgggtttcggcttgaagagccgttttttctatctgaatgactaaagtacccctctcgagagagctctcactaacact

SEQ ID NO: 119 - protein, 295 aa, Arabidopsis thaliana
MARQINIESSVSQVTFISSAIPAVSSSSSITASASLSSSPTTSSSSSSSTNSNFIEEDNSKRKASRRSLSSLVSVEDDDDQNGGGGKRRKTNGGDKHPTYRGVRMRSWGKWVSEIREPRKKSRIWLGTYPTAEMAARAHDVAALAIKGTTAYLNFPKLAGELPRPVTNSPKDIQAAASLAAVNWQDSVNDVSNSEVAEIVEAEPSRAVVAQLFSSDTSTTTTTQSQEYSEASCASTSACTDKDSEEEKLFDLPDLFTDENEMMIRNDAFCYYSSTWQLCGADAGFRLEEPFFLSE

SEQ ID NO: 120 - DNA, 970 bp, Arabidopsis thaliana
tatcaaacgagagtacaaaagatgacgtcactcaacagctctgcatcaccaacatcatcgtcatcagaccaatctgatgcaactactacaacaagcacccacttgtctgaagaagaagctccacccagaaacaacaacacaagaaagagaaggagagattcttcttctgcttcttcatcttcttcaatgcaacatcctgtttacagaggtgtgcggatgagaagttggggcaaatgggtctccgagatccgacaacctcgtaagaaaactcgtatttggctcggcacttttgtcaccgctgatatggctgctcgtgctcacgacgtcgctgctctcaccatcaaaggctcctccgccgtcttaaatttccctgagcttgcttctctcttccctcgtccggcgtcatcatcgccgcatgatatccagacagccgccgcagaagccgccgccatggtggtcgaagaaaaactgttagagaaggatgaggctccggaggccccaccttcgtcggaatcttcttacgtggcggcggagtcagaggatgaggagaggttggagaaaattgtggagctgcctaacattgaagaaggaagttatgacgagagtgtgacatcacgtgctgatctggcttattctgagccgttcgattgttgggtgtatcctccggttatggatttttatgaagaaatatcggagtttaatttcgtggaattgtggagctttaatcactaattaagttaggaaagtgcattatattgcaatattgcatcatagataacatttgtatttcttttctttttgtacggatacgtagcatatgctactatactagggctagtgtaccaaatattgtaaaatatacttattaatatttatgtaaatgtgtaatatatataacatacaattattgtaagtttggaaattggaaactatcgttacgcaatgttcttgtaaaaaaaaaaaaaaaaaa

SEQ ID NO: 121 - protein, 236 aa, Arabidopsis thaliana
MTSLNSSASPTSSSSDQSDATTTTSTHLSEEEAPPRNNNTRKRRRDSSSASSSSSMQHPVYRGVRMRSWGKWVSEIRQPRKKTRIWLGTFVTADMAARAHDVAALTIKGSSAVLNFPELASLFPRPASSSPHDIQTAAAEAAAMVVEEKLLEKDEAPEAPPSSESSYVAAESEDEERLEKIVELPNIEEGSYDESVTSRADLAYSEPFDCWVYPPVMDFYEEISEFNFVELWSFNH

SEQ ID NO: 122 - DNA, 957 bp, Arabidopsis thaliana
cggacgcgtgggcaaatattaaaataaaaagtgtcggtgaattctcaatctttgtcttctttcgtcgtctctttaaaactcctccgtccctccttattatgtaaccgtctcgccgtcaaattttcaaaatctctccctccgttcataaacccagatcgaaatttatggttttgtaatttttttaccggcggttatggagacggaagcggcggtgacagcgacggttacggcggcgacgatggggattgggacgaggaagagagatctgaaaccgtataaaggaatacgaatgaggaaatgggggaaatgggtggcggagatacgggaaccgaataagagatcaaggatctggttaggttcttatgcgacgcctgaagcggcggcgagagcttacgacactgctgttttttacctccgtggtccttcagcgaggcttaattttccggagcttttggctggacttactgtttctaacggcggaggaagaggtggtgatttatcggcggcgtatattaggagaaaagcggcggaggttggtgctcaggttgatgcgcttggagcgacggtggttgtgaataccggcggcgagaatcgcggtgattacgagaagattgagaattgtcgtaagagcggtaacgggtcattggaacgggtcgatttgaataaattacccgacccggaaaattcggatggtgatgatgacgaatgtgtgaaaagaagatagaaaaaataaaaagtagttgtagaaggagagacgagaatgtttgtctttaagatgcgctgttgccgctaacatgcgctttcgattttagtgttaaacatgcgcctccattgtttttgggttttgttttcgtcgtcgataatcaaagattttaaaacacaattctcaaatttttcacttgttacaaactagatttgcatgatctttgtattaacgaataacgattaagtcctaaa

SEQ ID NO: 123 - protein, 176 aa, Arabidopsis thaliana
METEAAVTATVTAATMGIGTRKRDLKPYKGIRMRKWGKWVAEIREPNKRSRIWLGSYATPEAAARAYDTAVFYLRGPSARLNFPELLAGLTVSNGGGRGGDLSAAYIRRKAAEVGAQVDALGATVVVNTGGENRGDYEKIENCRKSGNGSLERVDLNKLPDPENSDGDDDECVKRR

SEQ ID NO: 124 - DNA, 553 bp, Arabidopsis thaliana; identical to SEQ ID NO: 1

SEQ ID NO: 125 - protein, 133 aa, Arabidopsis thaliana; identical to SEQ ID NO: 2

SEQ ID NO: 126 - DNA, 679 bp, Arabidopsis thaliana
cttttataagcaatggctccaagacaggcgaacggtagaagcattgccgtgagtgaaggcggcggagggaagacgatgacgatgacgacgatgcggaaggaagtgcactttagaggtgtgaggaagcgtccatggggtagatacgcggcggagatccgtgacccgggaaagaaaacccgggtttggctcgggacattcgacacggcggaggaagctgcaagagcttacgacaccgccgctagagagtttcgtggctccaaagcaaagactaatttccctcttcccggagagtctactacggttaacgacggtggcgagaacgattcttacgtcaaccgtacgacggtgacgacggcgcgtgagatgacgcgtcagagatttccgtttgcatgtcaccgggagcgtaaagtcgtcggtggttatgcttctgctggttttttcttcgatccgtcaagagctgcttcgttaagagcagagctttctcgggtttgtccggttcggtttgatccggttaatatcgagttgagtattggtattcgagaaaccgtaaaagttgaaccgagaagagaactaaacctggatcttaacctagctccaccggtggtggacgtttagatttttttcttcttttcataatttgtattttacattgccggaaaataattaatgttttctttag

SEQ ID NO: 127 - protein, 200 aa, Arabidopsis thaliana
MAPRQANGRSIAVSEGGGGKTMTMTTMRKEVHFRGVRKRPWGRYAAEIRDPGKKTRVWLGTFDTAEEAARAYDTAAREFRGSKAKTNFPLPGESTTVNDGGENDSYVNRTTVTTAREMTRQRFPFACHRERKVVGGYASAGFFFDPSRAASLRAELSRVCPVRFDPVNIELSIGIRETVKVEPRRELNLDLNLAPPVVDV

SEQ ID NO: 128 - DNA, 911 bp, Arabidopsis thaliana
aacacacattccctctcttccttcaactagaaaaaagatagatatatcggacatttattgatctgtgtatgcataaaggtatagtatcattattagaaagatgaacacaacatcatcaaagagcaagaagaagcaagacgatcaggttggtacaaggtttcttggggtgagaagaaggccttggggaagatacgcagctgagattagagacccaactacgaaggagcgtcactggcttggcactttcgatacggcggaagaagctgccttggcctacgatagagctgctcggtccatgcgtggcacacgtgccagaaccaactttgtttactcagacatgcctccttcctcatccgtcacctccattgtttctcctgacgatcctcctcctcctccacctcctcctgctcctcctagcaatgatcctgtcgattacatgatgatgtttaaccaatactcatccactgactcgccaatgcttcagcctcattgtgatcaagtggacagttacatgtttggtggctctcaatcttcgaattcttattgctattctaatgacagtagtaatgagctgcctcctctcccgagcgacttgtcgaattcgtgttatagccaaccacagtggacctggaccggtgacgactactcgtctgagtacgtacatagtccaatgttcagcagaatgcctccggtttctgactctttccctcaaggtttcaactactttggctcctaattctttctcatcgtccatatttaataccttcctcatttgtaccttttccttcttcttcttttttgggtttatctatgtttcgccgtccttgatctctgcctatgtgatcaaagtgactgtttgtcattagtttttcaataacaagttatcatttgtatcttgaaaaaaaaaaaaa

SEQ ID NO: 129 - protein, 211 aa, Arabidopsis thaliana
MNTTSSKSKKKQDDQVGTRFLGVRRRPWGRYAAEIRDPTTKERHWLGTFDTAEEAALAYDRAARSMRGTRARTNFVYSDMPPSSSVTSIVSPDDPPPPPPPPAPPSNDPVDYMMMFNQYSSTDSPMLQPHCDQVDSYMFGGSQSSNSYCYSNDSSNELPPLPSDLSNSCYSQPQWTWTGDDYSSEYVHSPMFSRMPPVSDSFPQGFNYFGS

SEQ ID NO: 130 - DNA, 933 bp, Arabidopsis thaliana
attctcccccaaccaaaatatgaccacagaaaaagagaatgtcactacggccgtggccgtgaaagacggcggagaaaagagtaaggaagtgagtgacaagggcgtaaagaagagaaagaatgtaactaaggccctggccgtgaatgacggcggagaaaagagtaaggaagtgcgttacaggggtgtaaggaggagaccatgggggagatatgctgcggagatccgtgatccggtaaagaaaaaacgggtctggctcgggtccttcaacacgggggaggaagccgccagagcctacgactccgctgccataaggtttcgaggatcgaaagctactactaacttccctctaatcggatactatgggatttcttcggcgacgccggtgaacaacaacctttccgagacggtgagtgatggaaatgccaacctccctctcgttggagacgatgggaatgctttggcttctccggtgaacaacaccctttccgaaacggcgcgtgatggaacacttccatcggattgtcacgacatgttatctccgggggtggctgaagcggttgctggatttttcttagatctgcctgaagttattgcgttgaaagaggagcttgatcgagtttgtcctgaccagtttgagtccattgatatggggttgactattggtcctcaaaccgccgtggaagagcctgagacttcctccgccgtggattgtaagctgcgaatggaaccggatcttgacctcaacgcaagtccctaaagattgatctgatgttgttgtccttgaataagtttgttatcttgtcgctcttctgattgtctgtacttctattggttgattcgtgcttttggaggacaaaacaaacatttttttatgtattaaaaaaaggtaattgaactattatcgaaaaaaaaaaaaaaaaaaaaaaaaaaaaa

SEQ ID NO: 131 - protein, 245 aa, Arabidopsis thaliana
MTTEKENVTTAVAVKDGGEKSKEVSDKGVKKRKNVTKALAVNDGGEKSKEVRYRGVRRRPWGRYAAEIRDPVKKKRVWLGSFNTGEEAARAYDSAAIRFRGSKATTNFPLIGYYGISSATPVNNNLSETVSDGNANLPLVGDDGNALASPVNNTLSETARDGTLPSDCHDMLSPGVAEAVAGFFLDLPEVIALKEELDRVCPDQFESIDMGLTIGPQTAVEEPETSSAVDCKLRMEPDLDLNASP

SEQ ID NO: 132 - DNA, 754 bp, Arabidopsis thaliana
  misc_feature (677)..(677): n is a, c, g, or t
gtttccacagtccctgtacttgtgcataaaactgtaaaacactactctgaaaattttgcttctgttaggatataatgccaccctctcctcctaaatctccttttattagctcttcactcaaaggagctcatgaagatcgcaaatttaaatgctataggggtgtccgaaagaggtcttggggcaaatgggtgtctgaaatcagagttccaaagactggacgacgaatatggctaggttcatacgatgctccagagaaggcagctagagcctatgatgctgctttgttctgtattaggggtgagaagggagtttacaattttcccactgataaaaagccgcagcttccagaaggttctgtccggcctctgtccaagctcgacatacagacaatagcaacaaactatgcttcatcagttgtgcatgtaccttcccatgccaccacactcccggcaacaacccaggttccctctgaagttcctgcttcctctgatgtttctgcttctactgagattacagagatggtcgatgaatattatctcccaaccgatgcaactgcagaatcaatattctcagttgaagacttacaactggacagtttcctcatgatggacattgattggataaacaatctaatctgatgtgtaacgtcacttgcagtgacatttaatatggtttanctatcagttacctgtctgcttcttgtaagggtatacttggatccttgtctttgaacttgttttatttagcatgcaaa

SEQ ID NO: 133 - protein, 187 aa, Arabidopsis thaliana
MPPSPPKSPFISSSLKGAHEDRKFKCYRGVRKRSWGKWVSEIRVPKTGRRIWLGSYDAPEKAARAYDAALFCIRGEKGVYNFPTDKKPQLPEGSVRPLSKLDIQTIATNYASSVVHVPSHATTLPATTQVPSEVPASSDVSASTEITEMVDEYYLPTDATAESIFSVEDLQLDSFLMMDIDWINNLI

SEQ ID NO: 134 - DNA, 929 bp, Arabidopsis thaliana
cttgaaaaagaatctacctgaaaagaaaaaaaagagagagagatataaatagctttaccaagacagatatactatcttttattaatccaaaaagactgagaactctagtaactacgtactacttaaaccttatccagtttcttgaaacagagtactctgatcaatgaactcattttcagctttttctgaaatgtttggctccgattacgagcctcaaggcggagattattgtccgacgttggccacgagttgtccgaagaaaccggcgggccgtaagaagtttcgtgagactcgtcacccaatttacagaggagttcgtcaaagaaactccggtaagtgggtttctgaagtgagagagccaaacaagaaaaccaggatttggctcgggactttccaaaccgctgagatggcagctcgtgctcacgacgtcgctgcattagccctccgtggccgatcagcatgtctcaacttcgctgactcggcttggcggctacgaatcccggagtcaacatgcgccaaggatatccaaaaagcggctgctgaagcggcgttggcttttcaagatgagacgtgtgatacgacgaccacgaatcatggcctggacatggaggagacgatggtggaagctatttatacaccggaacagagcgaaggtgcgttttatatggatgaggagacaatgtttgggatgccgactttgttggataatatggctgaaggcatgcttttaccgccgccgtctgttcaatggaatcataattatgacggcgaaggagatggtgacgtgtcgctttggagttactaatattcgatagtcgtttccatttttgtactatagtttgaaaatattctagttcctttttttagaatggttccttcattttattttattttattgttgtagaaacgagtggaaaataattcaatac

SEQ ID NO: 135 - protein, 213 aa, Arabidopsis thaliana
MNSFSAFSEMFGSDYEPQGGDYCPTLATSCPKKPAGRKKFRETRHPIYRGVRQRNSGKWVSEVREPNKKTRIWLGTFQTAEMAARAHDVAALALRGRSACLNFADSAWRLRIPESTCAKDIQKAAAEAALAFQDETCDTTTTNHGLDMEETMVEAIYTPEQSEGAFYMDEETMFGMPTLLDNMAEGMLLPPPSVQWNHNYDGEGDGDVSLWSY

SEQ ID NO: 136 - DNA, 803 bp, Arabidopsis thaliana
ctgatcaatgaactcattttctgccttttctgaaatgtttggctccgattacgagtctccggtttcctcaggcggtgattacagtccgaagcttgccacgagctgccccaagaaaccagcgggaaggaagaagtttcgtgagactcgtcacccaatttacagaggagttcgtcaaagaaactccggtaagtgggtgtgtgagttgagagagccaaacaagaaaacgaggatttggctcgggactttccaaaccgctgagatggcagctcgtgctcacgacgtcgccgccatagctctccgtggcagatctgcctgtctcaatttcgctgactcggcttggcggctacgaatcccggaatcaacctgtgccaaggaaatccaaaaggcggcggctgaagccgcgttgaattttcaagatgagatgtgtcatatgacgacggatgctcatggtcttgacatggaggagaccttggtggaggctatttatacgccggaacagagccaagatgcgttttatatggatgaagaggcgatgttggggatgtctagtttgttggataacatggccgaagggatgcttttaccgtcgccgtcggttcaatggaactataattttgatgtcgagggagatgatgacgtgtccttatggagctattaaaattcgatttttatttccatttttggtattatagctttttatacatttgatccttttttagaatggatcttcttctttttttggttgtgagaaacgaatgtaaatggtaaaagttgttgtcaaatgcaaatgtttttgagtgcag

SEQ ID NO: 137 - protein, 207 aa, Arabidopsis thaliana
MFGSDYESPVSSGGDYSPKLATSCPKKPAGRKKFRETRHPIYRGVRQRNSGKWVCELREPNKKTRIWLGTFQTAEMAARAHDVAAIALRGRSACLNFADSAWRLRIPESTCAKEIQKAAAEAALNFQDEMCHMTTDAHGLDMEETLVEAIYTPEQSQDAFYMDEEAMLGMSSLLDNMAEGMLLPSPSVQWNYNFDVEGDDDVSLWSY

SEQ ID NO: 138 - DNA, 850 bp, Arabidopsis thaliana
cctgaactagaacagaaagagagagaaactattatttcagcaaaccataccaacaaaaaagacagagatcttttagttaccttatccagtttcttgaaacagagtactcttctgatcaatgaactcattttctgctttttctgaaatgtttggctccgattacgagtcttcggtttcctcaggcggtgattatattccgacgcttgcgagcagctgccccaagaaaccggcgggtcgtaagaagtttcgtgagactcgtcacccaatatacagaggagttcgtcggagaaactccggtaagtgggtttgtgaggttagagaaccaaacaagaaaacaaggatttggctcggaacatttcaaaccgctgagatggcagctcgagctcacgacgttgccgctttagcccttcgtggccgatcagcctgtctcaatttcgctgactcggcttggagactccgaatcccggaatcaacttgcgctaaggacatccaaaaggcggcggctgaagctgcgttggcgtttcaggatgagatgtgtgatgcgacgacggatcatggcttcgacatggaggagacgttggtggaggctatttacacggcggaacagagcgaaaatgcgttttatatgcacgatgaggcgatgtttgagatgccgagtttgttggctaatatggcagaagggatgcttttgccgcttccgtccgtacagtggaatcataatcatgaagtcgacggcgatgatgacgacgtatcgttatggagttattaaaactcagattattatttccatttttagtacgatactttttattttattattatttttagatccttttttagaatggaatct

SEQ ID NO: 139 - protein, 216 aa, Arabidopsis thaliana
MNSFSAFSEMFGSDYESSVSSGGDYIPTLASSCPKKPAGRKKFRETRHPIYRGVRRRNSGKWVCEVREPNKKTRIWLGTFQTAEMAARAHDVAALALRGRSACLNFADSAWRLRIPESTCAKDIQKAAAEAALAFQDEMCDATTDHGFDMEETLVEAIYTAEQSENAFYMHDEAMFEMPSLLANMAEGMLLPLPSVQWNHNHEVDGDDDDVSLWSY

SEQ ID NO: 140 - DNA, 1043 bp, Arabidopsis thaliana
cattttctgcaacttctccaaatctcatactttccagaaaatcattttcccaagaaaaataaaactttcccctttgttcttctccccccaacagcaatcacggcgtaccaatcggagctaggaggagattcctctcccttgaggaaatctgggagaggaaagatcgaaatcaaacggatcgagaacacaacgaatcgtcaagtcactttttgcaaacgtagaaatggtttgctcaagaaagcttacgagctctctgttctctgtgatgctgaagtcgcactcatcgttttctctagccgtggtcgtctctatgagtactctaacaacagtgtaaaaggtactattgagaggtacaagaaggcaatatcggacaattctaacaccggatcggtggcagaaattaatgcacagtattatcaacaagaatcagccaaattgcgtcaacaaattatcagcatacaaaactccaacaggcaattgatgggtgagacgatagggtcaatgtctcccaaagagctcaggaacttggaaggcagattagagagaagtattacccgaatccgatccaagaagaatgagctcttattttctgaaatcgactacatgcagaaaagagaagttgatttgcataacgataaccagattcttcgtgcaaagatagctgaaaatgagaggaacaatccgagtataagtctaatgccaggaggatctaactacgagcagcttatgccaccacctcaaacgcaatctcaaccgtttgattcacggaattatttccaagtcgcggcattgcaacctaacaatcaccattactcatccgccggtcgccaagaccaaaccgctctccagttagtgtaatattggctgaaggaaatggcctggagtgaataaaaaccagaattgggttgagcaagcaatataaagctaatgcatgttatatatatatttatcccatgaatgttgtatcagtgaattcttatgcttatgttgatgtgaaattaaatatcttaaagacatgtcattaatgtgcttaatttgcttca

SEQ ID NO: 141 - protein, 252 aa, Arabidopsis thaliana
TAYQSELGGDSSPLRKSGRGKIEIKRIENTTNRQVTFCKRRNGLLKKAYELSVLCDAEVALIVFSSRGRLYEYSNNSVKGTIERYKKAISDNSNTGSVAEINAQYYQQESAKLRQQIISIQNSNRQLMGETIGSMSPKELRNLEGRLERSITRIRSKKNELLFSEIDYMQKREVDLHNDNQILRAKIAENERNNPSISLMPGGSNYEQLMPPPQTQSQPFDSRNYFQVAALQPNNHHYSSAGRQDQTALQLV

SEQ ID NO: 142 - DNA, 1057 bp, Arabidopsis thaliana
ctttccaattggttcataccaaagtctgagctcttctttatatctctcttgtagtttcttattgggggtctttgttttgtttggttcttttagagtaagaagtttcttaaaaaaggatcaaaaatgggaaggggtagggttcaattgaagaggatagagaacaagatcaatagacaagtgacattctcgaaaagaagagctggtcttttgaagaaagctcatgagatctctgttctctgtgatgctgaagttgctcttgttgtcttctcccataaggggaaactcttcgaatactccactgattcttgtatggagaagatacttgaacgctatgagaggtactcttacgccgaaagacagcttattgcacctgagtccgacgtcaatacaaactggtcgatggagtataacaggcttaaggctaagattgagcttttggagagaaaccagaggcattatcttggggaagacttgcaagcaatgagccctaaagagcttcagaatctggagcagcagcttgacactgctcttaagcacatccgcactagaaaaaaccaacttatgtacgagtccatcaatgagctccaaaaaaaggagaaggccatacaggagcaaaacagcatgctttctaaacagatcaaggagagggaaaaaattcttagggctcaacaggagcagtgggatcagcagaaccaaggccacaatatgcctccccctctgccaccgcagcagcaccaaatccagcatccttacatgctctctcatcagccatctccttttctcaacatgggtggtctgtatcaagaagatgatcctatggcaatgaggaggaatgatctcgaactgactcttgaacccgtttacaactgcaaccttggctgcttcgccgcatgaagcatttccatatatatatttgtaatcgtcaacaataaaaacagtttgccacatacatataaatagtggctaggctcttttcatccaattaatatattttggcaaatgttcgatgttcttatatcatcatatataaattagcaggctcctttctttttttgta

SEQ ID NO: 143 - protein, 256 aa, Arabidopsis thaliana
MGRGRVQLKRIENKINRQVTFSKRRAGLLKKAHEISVLCDAEVALVVFSHKGKLFEYSTDSCMEKILERYERYSYAERQLIAPESDVNTNWSMEYNRLKAKIELLERNQRHYLGEDLQAMSPKELQNLEQQLDTALKHIRTRKNQLMYESINELQKKEKAIQEQNSMLSKQIKEREKILRAQQEQWDQQNQGHNMPPPLPPQQHQIQHPYMLSHQPSPFLNMGGLYQEDDPMAMRRNDLELTLEPVYNCNLGCFAA

SEQ ID NO: 144 - DNA, 895 bp, Arabidopsis thaliana
ggatcaatggaggaaggtgggagtagtcacgacgcagagagtagcaagaaactagggagagggaaaatagagataaagaggatagagaacacaacaaatcgtcaagttactttctgcaaacgacgcaatggtcttctcaagaaagcttatgaactctctgtcttgtgtgatgccgaagttgccctcgtcatcttctccactcgtggccgtctctatgagtacgccaacaacagtgtgaggggtacaattgaaaggtacaagaaagcttgttccgatgccgtcaaccctccttccgtcaccgaagctaatactcagtactatcagcaagaagcctctaagcttcggaggcagattcgagatattcagaattcaaataggcatattgttggggaatcacttggttccttgaacttcaaggaactcaaaaacctagaaggacgtcttgaaaaaggaatcagccgtgtccgctccaaaaagaatgagctgttagtggcagagatagagtatatgcagaagagggaaatggagttgcaacacaataacatgtacctgcgagcaaagatagccgaaggcgccagattgaatccggaccagcaggaatcgagtgtgatacaagggacgacagtttacgaatccggtgtatcttctcatgaccagtcgcagcattataatcggaactatattccggtgaaccttcttgaaccgaatcagcaattctccggccaagaccaacctcctcttcaacttgtgtaactcaaaacatgataacttgtttcttcccctcataacgattaagagagagacgagagagttcattttatatttataacgcgactgtgtattcatagtttaggttctaataatgataataacaaaactgttgtttctttgcttc

SEQ ID NO: 145 - protein, 248 aa, Arabidopsis thaliana
MEEGGSSHDAESSKKLGRGKIEIKRIENTTNRQVTFCKRRNGLLKKAYELSVLCDAEVALVIFSTRGRLYEYANNSVRGTIERYKKACSDAVNPPSVTEANTQYYQQEASKLRRQIRDIQNSNRHIVGESLGSLNFKELKNLEGRLEKGISRVRSKKNELLVAEIEYMQKREMELQHNNMYLRAKIAEGARLNPDQQESSVIQGTTVYESGVSSHDQSQHYNRNYIPVNLLEPNQQFSGQDQPPLQLV

SEQ ID NO: 146 - DNA, 963 bp, Arabidopsis thaliana
gaattcatcttcccatcctcacttctctttctttctgatcataattaatcttgctaagccagctagggcttatagaaatggagggtggtgcgagtaatgaagtagcagagagcagcaagaagatagggagagggaagatagagataaagaggatagagaacactacgaatcgtcaagtcactttctgcaaacgacgcaatggtttactcaagaaagcttatgagctctctgtcttgtgtgacgctgaggttgctcttgtcatcttctccactcgaggccgtctctacgagtacgccaacaacagtgtgagaggaacaatagaaaggtacaagaaagcttgctccgacgccgttaaccctccgaccatcaccgaagctaatactcagtactatcagcaagaggcgtctaaactccggagacagattcgggacattcagaatttgaacagacacattcttggtgaatctcttggttccttgaactttaaggaactcaagaaccttgaaagtaggcttgagaaaggaatcagtcgtgtccgatccaagaagcacgagatgttagttgcagagattgaatacatgcaaaaaagggaaatcgagctgcaaaacgataacatgtatctccgctccaagattactgaaagaacaggtctacagcaacaagaatcgagtgtgatacatcaagggacagtttacgagtcgggtgttacttcttctcaccagtcggggcagtataaccggaattatattgcggttaaccttcttgaaccgaatcagaattcctccaaccaagaccaaccacctctgcaacttgtttgattcagtctaacataagcttctttcctcagcctgagatcgatctatagtgtcacctaaatgcggccgcgtccctcaacatctagtcgcaagctgaggggaaccactagtgtcatacgaacctccaagagacggttacacaaacggg

SEQ ID NO: 147 - protein, 246 aa, Arabidopsis thaliana
MEGGASNEVAESSKKIGRGKIEIKRIENTTNRQVTFCKRRNGLLKKAYELSVLCDAEVALVIFSTRGRLYEYANNSVRGTIERYKKACSDAVNPPTITEANTQYYQQEASKLRRQIRDIQNLNRHILGESLGSLNFKELKNLESRLEKGISRVRSKKHEMLVAEIEYMQKREIELQNDNMYLRSKITERTGLQQQESSVIHQGTVYESGVTSSHQSGQYNRNYIAVNLLEPNQNSSNQDQPPLQLV

SEQ ID NO: 148 - DNA, 906 bp, Arabidopsis thaliana
aagaaaatgggaagagggagagtagaattgaagaggatagagaacaagatcaataggcaagtgacgtttgcaaagagaaggaatggtcttttgaagaaagcatacgagctttcagttctatgtgatgcagaagttgctctcatcatcttctcaaatagaggaaagctgtacgagttttgcagtagttcgagcatgcttcggacactggagaggtaccaaaagtgtaactatggagcaccagaacccaatgtgccttcaagagaggccttagcagttgaacttagtagccagcaggagtatctcaagcttaaggagcgttatgacgccttacaaagaacccaaaggaatctgttgggagaagatcttggacctctaagtacaaaggagcttgagtcacttgagagacagcttgattcttccttgaagcagatcagagctctcaggacacagtttatgcttgaccagctcaacgatcttcagagtaaggaacgcatgctgactgagacaaataaaactctaagactaaggttagctgatgggtatcagatgccactccagctgaaccctaaccaagaagaggttgatcactacggtcgtcatcatcatcaacaacaacaacactcccaagctttcttccagcctttggaatgtgaacccattcttcagatcgggtatcaggggcagcaagatggaatgggagcaggaccaagtgtgaataattacatgttgggttggttaccttatgacaccaactctatttgaatctttctcacttaattaatctctcttttttttgacatttttaagatgatgtttctattttattacctctctcacgttttctgtcttgtgtgcatgtgtctgtgtaatgtttattgcccttctattattcaatgatttctcgac

SEQ ID NO: 149 - protein, 251 aa, Arabidopsis thaliana
MGRGRVELKRIENKINRQVTFAKRRNGLLKKAYELSVLCDAEVALIIFSNRGKLYEFCSSSSMLRTLERYQKCNYGAPEPNVPSREALAVELSSQQEYLKLKERYDALQRTQRNLLGEDLGPLSTKELESLERQLDSSLKQIRALRTQFMLDQLNDLQSKERMLTETNKTLRLRLADGYQMPLQLNPNQEEVDHYGRHHHQQQQHSQAFFQPLECEPILQIGYQGQQDGMGAGPSVNNYMLGWLPYDTNSI

SEQ ID NO: 150 - DNA, 905 bp, Arabidopsis thaliana
acgagagcaaattctcaggatgggaagaggaaagatagaaataaagaggatagagaactcaacaaatcgacaagtgacgttttgcaaaagaagaaatggacttctgaagaaagcctatgagctttcggtcctttgcgatgcagaagttgcgctcattgttttctccactcgtggccgtctctatgaatacgccaataacaacataagatcaaccattgagaggtacaagaaagcttgttctgatagcaccaacactagcactgtccaagaaatcaatgccgcgtactatcaacaagaatctgctaagctgagacaacagatccaaacgattcaaaactccaacaggaatctgatgggagactctttgagttccttaagtgtcaaggaactaaaacaagttgagaatcgccttgagaaagctatctctaggatcaggtccaagaagcatgagttgcttctagttgaaatcgaaaacgcgcagaaaagggagattgagcttgacaatgagaacatctatctaagaactaaggtagcagaagtggagaggtatcaacaacaccatcatcaaatggttagtggttcagagattaacgcaattgaagctttagcctcacgcaattactttgctcatagcattatgactgctggttctggatctggtaatggaggttcttactctgatcccgacaagaaaattcttcatctcggataatctcgtctgcgaaaaaccgagctgcaataactctctgcatgcatctggggattctttgctcagatttatctctacataaaatatgttttggtgcaaaataattcaaagtacaatgaaggtattggtccttcaagactcattgcaatttgtgttgtgtaatgattaagacatactctagtttttattgcttcgt

SEQ ID NO: 151 - protein, 230 aa, Arabidopsis thaliana
MGRGKIEIKRIENSTNRQVTFCKRRNGLLKKAYELSVLCDAEVALIVFSTRGRLYEYANNNIRSTIERYKKACSDSTNTSTVQEINAAYYQQESAKLRQQIQTIQNSNRNLMGDSLSSLSVKELKQVENRLEKAISRIRSKKHELLLVEIENAQKREIELDNENIYLRTKVAEVERYQQHHHQMVSGSEINAIEALASRNYFAHSIMTAGSGSGNGGSYSDPDKKILHLG

SEQ ID NO: 152 - DNA, 636 bp, Arabidopsis thaliana
atggctcgtggaaagattcagcttaagaggattgagaacccggttcacagacaagtgactttttgcaagaggagaactggtcttctcaagaaggctaaggagctctctgtgctctgtgatgccgagatcggtgttgtgatcttctctcctcagggcaagctctttgagctcgctactaaaggaacaatggagggaatgattgataagtacatgaagtgtactggtggtggtcgtggttcttcttctgctacttttactgctcaagaacaacttcaaccaccaaatcttgatccgaaagatgagatcaacgtgcttaagcaagagattgagatgcttcagaaagggataagctatatgtttggaggaggagatggggctatgaatcttgaagaacttcttttgcttgagaagcatcttgagtattggatttctcagattcgctctgctaagatggatgttatgcttcaagaaattcagtcattgaggaacaaggaaggagtcctcaaaaacaccaacaagtatctcctcgaaaagatagaggaaaacaacaatagcatattagatgctaacttcgcagtcatggagacaaactattcctatccgctaacaatgccaagtgaaatatttcagttctag

SEQ ID NO: 153 - protein, 211 aa, Arabidopsis thaliana
MARGKIQLKRIENPVHRQVTFCKRRTGLLKKAKELSVLCDAEIGVVIFSPQGKLFELATKGTMEGMIDKYMKCTGGGRGSSSATFTAQEQLQPPNLDPKDEINVLKQEIEMLQKGISYMFGGGDGAMNLEELLLLEKHLEYWISQIRSAKMDVMLQEIQSLRNKEGVLKNTNKYLLEKIEENNNSILDANFAVMETNYSYPLTMPSEIFQF

SEQ ID NO: 154 - DNA, 914 bp, Arabidopsis thaliana
aaagaagagagagagcgagtgagagatgggaagaggcaaagtggaagtgaagagaattgagaacaagatcactagacaagtaaccttctccaaaagaaaaagtggtttgctcaagaaagcctacgaactctctgttctttgtgatgcagaggtttctctcataatcttctccaccggtggcaagctctacgagttcagcaatgtcggagttggcagaaccattgagaggtactatcgctgtaaagacaatcttttggacaatgatacgcttgaagatactcagggcttgcgtcaagaggtgacaaagctcaaatgcaaatacgaatctcttcttcgcactcataggaatttggttggggaagatcttgaagggatgagtataaaggaattgcagacgctggagagacagcttgaaggagctctttccgcaacccgaaaacaaaagacgcaggttatgatggaacaaatggaagagcttcggagaaaggagagggagctcggagatataaacaataagctaaagcttgagacagaagatcatgattttaaaggctttcaagacctactgcttaacccggtgctcaccgccggttgttccactgatttttccttgcaatcaactcatcaaaattatatatcggattgcaaccttggatattttttacagattgggtttcaacaacactatgagcaaggtgaaggatcttcggtgacaaagagtaatgcaagaagtgatgctgagaccaactttgtccaatgatgggtttcgttgtcttggtttggactcattgagtcacgacgaagcgtttaggtcatttactatcgggacatactcttttttttttttttttctttttttttttcacaagacatactcttttctttaatttcaattatttgttagagttctcgtt

SEQ ID NO: 155 - protein, 244 aa, Arabidopsis thaliana
MGRGKVEVKRIENKITRQVTFSKRKSGLLKKAYELSVLCDAEVSLIIFSTGGKLYEFSNVGVGRTIERYYRCKDNLLDNDTLEDTQGLRQEVTKLKCKYESLLRTHRNLVGEDLEGMSIKELQTLERQLEGALSATRKQKTQVMMEQMEELRRKERELGDINNKLKLETEDHDFKGFQDLLLNPVLTAGCSTDFSLQSTHQNYISDCNLGYFLQIGFQQHYEQGEGSSVTKSNARSDAETNFVQ

SEQ ID NO: 156 - DNA, 1058 bp, Arabidopsis thaliana
cccagagagacataagaaagaaagagagagagagatactttggtcatttcagggttgtcgtttctctctcttgttcttgagattttgaagagagagagatatgggaagaggtagggttcagctgaagaggatagagaacaagatcaataggcaagttactttctcaaagagaaggtctggtttgctcaagaaagctcatgagatctctgttctctgcgatgctgaggttgctctcatcgtcttctcttccaaaggcaaactcttcgaatattccaccgactcttgcatggagaggatacttgaacgctatgatcgctatttatattcagacaaacaacttgttggccgagacgtttcacaaagtgaaaattgggttctagaacatgctaagctcaaggcaagagttgaggtacttgagaagaacaaaaggaattttatgggggaagatcttgattcgttgagcttgaaggagcttcaaagcttggagcatcagctcgatgcagctatcaagagcattaggtcaagaaagaaccaagctatgttcgaatccatatctgcgctccagaagaaggataaagccttgcaagatcacaacaattcgcttctcaaaaagattaaggagagggagaagaaaacgggtcagcaagaaggacaattagtccaatgctccaactcttcttcagttcttctgcctcaatactgcgtaacctcctccagagatggctttgtggagagagttgggggagagaacggtggtgcatcgtcgttgacggaaccaaactctctgcttccggcttggatgttacgtcctaccactacgaacgagtagaactatctcactctttataatataatgataatataattaatgtttaatattttcataacattcagcatttttttggtgacttatactcattattaataccgatatgttttagctagtcatattatatgtatgatggaactccgttgtcgagacgtatgtacgtaagctatcattagattcactgcgtcttaagaacaaagattcatatcttggtaatgatttctcatga

SEQ ID NO: 157 - protein, 242 aa, Arabidopsis thaliana
MGRGRVQLKRIENKINRQVTFSKRRSGLLKKAHEISVLCDAEVALIVFSSKGKLFEYSTDSCMERILERYDRYLYSDKQLVGRDVSQSENWVLEHAKLKARVEVLEKNKRNFMGEDLDSLSLKELQSLEHQLDAAIKSIRSRKNQAMFESISALQKKDKALQDHNNSLLKKIKEREKKTGQQEGQLVQCSNSSSVLLPQYCVTSSRDGFVERVGGENGGASSLTEPNSLLPAWMLRPTTTNE

SEQ ID NO: 158 - DNA, 947 bp, Arabidopsis thaliana
  misc_feature (924)..(925): n is a, c, g, or t
  misc_feature (929)..(929): n is a, c, g, or t
  misc_feature (932)..(933): n is a, c, g, or t
aggaagagggagccactcataagaggaagaagagagagatgggtagagggaagatagagataaagaagatagagaatcagacggcgaggcaagtgaccttctccaagagaagaactggtcttataaagaagactcgtgagctctctattctctgtgacgctcacatcggtctcatcgtcttctcagccaccggaaagctttccgagttctgctccgaacagaacaggatgcctcaactcattgaccgatacttgcataccaacggattgcgacttcctgatcatcatgacgaccaggagcaattgcaccatgagatggaactactaagaagagagacatgtaaccttgagcttcgtctgcgtccattccatggacatgacttagcctccattcctcctaatgagcttgacggactcgagagacagctagaacattctgtcctcaaagtccgtgagcgtaagaggaggatgctagaagaagataacaacaacatgtaccgttggcttcatgagcatcgtgcagcgatggagtttcaacaagctgggatagataccaaaccaggggagtatcaacagtttatagagcagcttcagtgctataaaccaggggagtatcagcagtttctagagcagcagcaacaacaaccaaacagcgttcttcagcttgctacacttccttctgagattgatcctacttacaatctccagcttgctcagcctaatcttcaaaacgatccaacggcccagaatgattaatacaattctcaatagatatctactctttctttatggagacagattcatgaacttttattacctatattttgataagccagtgtcttcttttgtgtggctatggaaaccttgtttaaagcacaatgcacttgagttcttggttatataattaatcatcattattacatannaaanaannaaaaaaaaaaaaaa

SEQ ID NO: 159 - protein, 238 aa, Arabidopsis thaliana
MGRGKIEIKKIENQTARQVTFSKRRTGLIKKTRELSILCDAHIGLIVFSATGKLSEFCSEQNRMPQLIDRYLHTNGLRLPDHHDDQEQLHHEMELLRRETCNLELRLRPFHGHDLASIPPNELDGLERQLEHSVLKVRERKRRMLEEDNNNMYRWLHEHRAAMEFQQAGIDTKPGEYQQFIEQLQCYKPGEYQQFLEQQQQQPNSVLQLATLPSEIDPTYNLQLAQPNLQNDPTAQND

SEQ ID NO: 160 - DNA, 991 bp, Arabidopsis thaliana
tcaaatttgtcatttgtttattcaaatttttgagaaaatggtgagaagtaccaaaggtcgtcagaaaatagagatgaaaaaaatggaaaacgaaagcaaccttcaggttactttctcaaaaagaagattcggtcttttcaaaaaagctagtgaactttgcacattaagtggtgcagagattctgttgattgtgttctctcctggtgggaaagtgttttcttttggccatccaagtgttcaagaactcattcatcgcttttcgaatcctaaccataattctgccattgtccatcatcagaacaacaatctccaacttgttgaaacccgtccggatagaaatatccaatatctcaacaatatactcactgaggtgctggcaaaccaggaaaaggagaaacagaagagaatggttttggacctattgaaagaatccagagaacaagtaggaaactggtatgaaaaagatgtgaaagatctcgacatgaatgaaaccaaccagctgatatctgctcttcaagatgtgaaaaagaaactggtaagagaaatgtctcaatattctcaagtaaatgtttcgcagaattactttggtcaaagttctggcgtgattggtggtggtaatgttggcattgatctttttgatcaaagaagaaatgcattcaactataatccaaacatggtgtttcccaatcatacaccaccaatgtttggatacaacaatgatggagttctcgttccgatatccaacatgaactacatgtcaagttacaacttcaaccagagctagagtctgaagctagaagaacatcctaatcaatatttgcgttattttggctatggttactgttaggattgttcttgtattgtgagacttaagtttgttttttcttttaatttgtttcagttggttggtttttcattttattcgtcgtttgttttcctttgtttttggatatttttgtatcccagaataaatttatttatcctttaaaaa

SEQ ID NO: 161 - protein, 248 aa, Arabidopsis thaliana
MVRSTKGRQKIEMKKMENESNLQVTFSKRRFGLFKKASELCTLSGAEILLIVFSPGGKVFSFGHPSVQELIHRFSNPNHNSAIVHHQNNNLQLVETRPDRNIQYLNNILTEVLANQEKEKQKRMVLDLLKESREQVGNWYEKDVKDLDMNETNQLISALQDVKKKLVREMSQYSQVNVSQNYFGQSSGVIGGGNVGIDLFDQRRNAFNYNPNMVFPNHTPPMFGYNNDGVLVPISNMNYMSSYNFNQS

SEQ ID NO: 162 - DNA, 1454 bp, Arabidopsis thaliana
cgtcgacgatcagattcttgcgtatagctgtatatatacaccaagatacactcatcatcgtcatatatagattatgtgcagcgtctctgagcttcttgacatggaaaacttccaaggagacttaaccgacgtcgtacgaggaatcggaggccacgtgttatcaccggagactcctccctcgaacatctggcctcttcctctgtcacatccaacaccatcaccgtcagatcttaacataaaccccttcggagatccctttgtgagcatggacgatccactcctccaagaactaaactccatcacaaactccggctatttctccaccgtaggagataacaacaacaacattcacaacaacaatggtttcttggttccaaaggtatttgaggaggatcatataaagagtcaatgtagtatcttcccaagaatccggatctcgcatagtaacatcatccacgattcttctccgtgtaattctccggccatgtcggctcacgttgtcgcagccgcagcagccgcctcgccgagaggcatcatcaacgtagacacaaacagtcctagaaactgtctattggttgatggtaccacgttctcctcgcagattcagatatcttcccctcggaatctaggccttaaaagaaggaagagtcaggcaaagaaggtggtgtgtattccggccccggctgcaatgaacagccgatcaagcggagaagtggttccatcggatctatgggcttggcgtaaatacggtcaaaaacctatcaaaggctctccttttccaaggggttattatagatgcagcagctcaaaaggttgttcagcaagaaagcaagtcgaaagaagccgaaccgatccaaacatgttggtgattacatatacctccgaacataaccatccttggcccatccaacgcaacgctctcgccggctccacacgctcctccacctcctcctcatctaaccctaatccttccaaaccctcaaccgcaaacgtaaactcctcatccattggctcccaaaacaccatctacttgccttcctccaccactcctcctcctaccctctcatcctccgccatcaaagatgaacgaggggacgatatggagttggaaaacgtagatgatgatgatgataaccagattgctccatacagaccggagcttcatgatcatcagcaccaaccagatgatttctttgcagatcttgaagagctagaaggagattctctaagcatgttgctttctcatggctgtggcggcgacgggaaggataaaacgaccgcgtccgatgggatcagcaatttcttcgggtggtcgggagataataattataataattacgacgaccaagactcaaggtcgttatagtatagtgttaattacaggtaaacaaattatattaaattaagttgagcttgtgaaaatgaagatcatatggtctggtcaggttgggggc

SEQ ID NO: 163 - protein, 430 aa, Arabidopsis thaliana
MCSVSELLDMENFQGDLTDVVRGIGGHVLSPETPPSNIWPLPLSHPTPSPSDLNINPFGDPFVSMDDPLLQELNSITNSGYFSTVGDNNNNIHNNNGFLVPKVFEEDHIKSQCSIFPRIRISHSNIIHDSSPCNSPAMSAHVVAAAAAASPRGIINVDTNSPRNCLLVDGTTFSSQIQISSPRNLGLKRRKSQAKKVVCIPAPAAMNSRSSGEVVPSDLWAWRKYGQKPIKGSPFPRGYYRCSSSKGCSARKQVERSRTDPNMLVITYTSEHNHPWPIQRNALAGSTRSSTSSSSNPNPSKPSTANVNSSSIGSQNTIYLPSSTTPPPTLSSSAIKDERGDDMELENVDDDDDNQIAPYRPELHDHQHQPDDFFADLEELEGDSLSMLLSHGCGGDGKDKTTASDGISNFFGWSGDNNYNNYDDQDSRSL

SEQ ID NO: 164 - DNA, 1974 bp, Arabidopsis thaliana
tgaattctagcctttttgtaggcgaatcatctggaccggtaagagactctctcatcgataataaccacataatttaatcaaactctttctctctctttctaagatcttttgctttgctcttttcctttttgatcttcctatatatggagaagcaccaaaacggtacttactatacgatactgtacggatccatcaaactggattaattatcaaaacgtacatttttatcttacctggcaagttacattcctagggttttggagaatccaatcaacaacaaagaaaataatcatcgttacaataatcagtatcacgcacagacttagatgttccggtttccagtgagtctaggcggttcacgtgacgaagaccgtcacgatcagatcacaccgttggatgaccatcgtgtggtggttgatgaggttgacttcttctcagagaagagagatagggtttcacgtgagaacatcaacgacgacgacgacgaaggcaataaggttctcatcaaaatggagggttcacgagttgaagaaaacgatcgttccagagatgtcaatatcggtctgaatcttctgaccgcgaatacgggaagcgatgagtcaacggtggatgatggactatcaatggatatggaagataaacgtgcaaagattgagaacgcacaactacaagaagagctcaagaagatgaaaatagagaatcaaaggctaagagatatgttgagccaagcgacgaccaacttcaatgccttacaaatgcaacttgttgccgtcatgaggcaacaagaacaacgtaactcttcacaagatcatctcctggagagcaaagcagaaggaaggaaacggcaggaactgcaaatcatggtgccaaggcagttcatggaccttgggccgtcgtctggagcagcagagcatggagccgaagtgtcatctgaagagaggacaacggttcgttcaggttctcctccttcgcttctagaaagttccaatccccgagagaacggaaagaggttgcttggaagagaagaaagctcagaggaatcagagtctaacgcctggggaaaccctaacaaagtccccaaacataatccatcctctagcaatagcaatggaaacagaaacggaaatgttattgatcagtcggccgcagaagccaccatgcggaaagcccgtgtctcagttcgtgcccgatctgaagctgccatgataagcgatggatgtcaatggagaaagtacggacaaaaaatggctaaaggaaacccgtgtccgcgggcttattatcgttgcacaatggccggtggatgtccagttcgcaagcaagtgcagcgttgcgcagaagacagatctattctcataaccacctacgaaggaaaccacaaccatccactcccaccagccgctacggccatggcctcaacaaccaccgcagctgcaagcatgctcctctcgggctcaatgtcgagtcaagacggtttaatgaacccaacaaacctcctagctcgagctatcttgccttgctcctcaagcatggctacaatctcagcctccgcaccattcccaaccatcacattggacctcaccaattcacccaacggtaacaaccctaatatgaccactaataacccgttgatgcagttcgctcaacggcccggtttcaacccggcagttttgcctcaagtggttggtcaagctatgtacaataaccaacaacagtccaagttttctggtttacagttaccggctcagccactgcagatcgcggccacttcctcggtggccgagagcgttagtgctgccagtgcagcaattgcgtccgatccaaactttgcggcggctctagcggcagcgatcacgtccattatgaacggttccagtcatcaaaataataacaccaataataataatgtggctacgagcaacaatgacagtaggcaataagagttttcattttgatggtcgatttttttttttgggg

SEQ ID NO: 165 - protein, 536 aa, Arabidopsis thaliana
MFRFPVSLGGSRDEDRHDQITPLDDHRVVVDEVDFFSEKRDRVSRENINDDDDEGNKVLIKMEGSRVEENDRSRDVNIGLNLLTANTGSDESTVDDGLSMDMEDKRAKIENAQLQEELKKMKIENQRLRDMLSQATTNFNALQMQLVAVMRQQEQRNSSQDHLLESKAEGRKRQELQIMVPRQFMDLGPSSGAAEHGAEVSSEERTTVRSGSPPSLLESSNPRENGKRLLGREESSEESESNAWGNPNKVPKHNPSSSNSNGNRNGNVIDQSAAEATMRKARVSVRARSEAAMISDGCQWRKYGQKMAKGNPCPRAYYRCTMAGGCPVRKQVQRCAEDRSILITTYEGNHNHPLPPAATAMASTTTAAASMLLSGSMSSQDGLMNPTNLLARAILPCSSSMATISASAPFPTITLDLTNSPNGNNPNMTTNNPLMQFAQRPGFNPAVLPQVVGQAMYNNQQQSKFSGLQLPAQPLQIAATSSVAESVSAASAAIASDPNFAAALAAAITSIMNGSSHQNNNTNNNNVATSNNDSRQ

SEQ ID NO: 166 - DNA, 1136 bp, Arabidopsis thaliana
tagacctcttaggaaaaaaacctaaaaacctaatccccaaacctaaaaggcttatctcatctcttcttctttgtcttctttactctttttttacctctctcttcattgttcttcaccatgtctaatgaaaccagagatctctacaactaccaatacccttcatcgttttcgttgcacgaaatgatgaatctgcctacttcaaatccatcttcttatggaaacctcccatcacaaaacggttttaatccatctacttattccttcaccgattgtctccaaagttctccagcagcgtatgaatctctacttcagaaaacttttggtctttctccctcttcctcagaggttttcaattcttcgatcgatcaagaaccgaaccgtgatgttactaatgacgtaatcaatggtggtgcatgcaacgagactgaaactagggtttctccttctaattcttcctctagtgaggctgatcaccccggtgaagattccggtaagagccggaggaaacgagagttagtcggtgaagaagatcaaatttccaaaaaagttgggaaaacgaaaaagactgaggtgaagaaacaaagagagccacgagtctcgtttatgactaaaagtgaagttgatcatcttgaagatggttatagatggagaaaatacggccaaaaggctgtaaaaaatagcccttatccaaggagttactatagatgtacaacacaaaagtgcaacgtgaagaaacgagtggagagatcgttccaagatccaacggttgtgattacaacttacgagggtcaacacaaccacccgattccgactaatcttcgaggaagttctgccgcggctgctatgttctccgcagacctcatgactccaagaagctttgcacatgatatgtttaggacggcagcttatactaacggcggttctgtggcggcggctttggattatggatatggacaaagtggttatggtagtgtgaattcaaaccctagttctcaccaagtgtatcatcaagggggtgagtatgagctcttgagggagatttttccttcaattttctttaagcaagagccttgatcgatcattgttataactacatatattatatatattgagagagagaggtagagaaaaaaaaa

SEQ ID NO: 167 - protein, 318 aa, Arabidopsis thaliana
MSNETRDLYNYQYPSSFSLHEMMNLPTSNPSSYGNLPSQNGFNPSTYSFTDCLQSSPAAYESLLQKTFGLSPSSSEVFNSSIDQEPNRDVTNDVINGGACNETETRVSPSNSSSSEADHPGEDSGKSRRKRELVGEEDQISKKVGKTKKTEVKKQREPRVSFMTKSEVDHLEDGYRWRKYGQKAVKNSPYPRSYYRCTTQKCNVKKRVERSFQDPTVVITTYEGQHNHPIPTNLRGSSAAAAMFSADLMTPRSFAHDMFRTAAYTNGGSVAAALDYGYGQSGYGSVNSNPSSHQVYHQGGEYELLREIFPSIFFKQEP

SEQ ID NO: 168 - DNA, 1418 bp, Arabidopsis thaliana
tctttcttctctctctatctctcctctttgaaccctaaaaactctttctttacaaggattgatctttttgtatttttgattttgacatttgctttgtgttcgatctctgttttgatgcgatttctctgtttttaaagccatttgatagattgtttccggtaaagctcagcgagagaagaagaagaacaacaatggagtttacagatttctcaaagacgagtttttactacccgtcgtcacaaagcgtttgggatttcggagatttagcggcggcggagaggcattctttagggttcatggagttattaagttctcagcagcatcaagactttgctactgtttctcctcattccttccttctccaaacgtctcaaccgcaaacgcaaacgcaaccatcggcgaagctgtcttcaagtatcattcaagctccaccgtcagagcaattagtgacgtcaaaggtggagtctttgtgttcggatcatttgttgataaacccaccggcgactcctaactcgtcatcgatttcgtctgcttcaagcgaggctctaaatgaagagaaaccgaaaacagaagacaatgaagaagaaggaggtgaagatcaacaagagaagagtcatactaagaaacagttgaaagcaaagaagaataatcagaagagacagagagaggcaagagtcgcattcatgacaaagagtgaagttgatcatctcgaagatggttatcgctggcgaaaatatggtcaaaaagctgtcaaaaacagtccttttcccaggagttactaccgttgcacaacggcttcatgtaacgtgaagaagagagtggagagatcattcagagatccaagcactgtggttacaacctacgaaggtcaacacactcacattagtccactcacgtctcgtcctatttccactggaggtttcttcggatcgtcaggagctgcttcgagtctcggtaatggttgctttgggtttcctattgatggctccacgttaatctctcctcagttccaacagcttgtccaataccatcaccaacagcagcaacaagaactcatgtcttgttttggaggagtcaacgagtaccttaatagccacgctaatgagtatggtgatgataatcgtgtgaagaagagtcgagttttggttaaagataatggacttctgcaagatgttgttccgtctcatatgttgaaggaagagtagtagtatatatatagtcttatagttttaatctagtttttttttgtataattgtctaaaagaaacggatcttttgttctgatgaagaagatgttttcttatggttctgaaatcgtaaggtaatgatgattgtaccaagccgagaaagtacttgtgattttcaccattgaatcactataaatgtaatttttatttactgtgaaaaaaaaaaaaaaa

SEQ ID NO: 169 - protein, 337 aa, Arabidopsis thaliana
MEFTDFSKTSFYYPSSQSVWDFGDLAAAERHSLGFMELLSSQQHQDFATVSPHSFLLQTSQPQTQTQPSAKLSSSIIQAPPSEQLVTSKVESLCSDHLLINPPATPNSSSISSASSEALNEEKPKTEDNEEEGGEDQQEKSHTKKQLKAKKNNQKRQREARVAFMTKSEVDHLEDGYRWRKYGQKAVKNSPFPRSYYRCTTASCNVKKRVERSFRDPSTVVTTYEGQHTHISPLTSRPISTGGFFGSSGAASSLGNGCFGFPIDGSTLISPQFQQLVQYHHQQQQQELMSCFGGVNEYLNSHANEYGDDNRVKKSRVLVKDNGLLQDVVPSHMLKEE

SEQ ID NO: 170 - DNA, 1269 bp, Arabidopsis thaliana
  misc_feature (1239)..(1239): n is a, c, g, or t
  misc_feature (1242)..(1242): n is a, c, g, or t
  misc_feature (1244)..(1244): n is a, c, g, or t
  misc_feature (1261)..(1263): n is a, c, g, or t
  misc_feature (1266)..(1267): n is a, c, g, or t
ttttctttttctttctttttggtttaagttttttctctttgttcttcgtcatgtctcatgaaatcaaagatcttaacaactatcactacacttcatcgtataatcattacaatatcaacaaccaaaatatgattaatctcccttacgtttctggtccatctgcttataatgcaaacatgatctcatcatcacaagtaggttttgatctaccctcgaagaacttgagtcctcaaggagccttcgagttgggtttcgagctttctccatcttcttctgacttttttaatccttccctcgatcaagagaacggtttgtataatgcttataattataatagtagtcaaaagagtcatgaagttgtcggtgatggttgtgcaaccattaagagtgaagttagggtttcagcatctccttcttcaagtgaggccgatcatcatccaggagaagattccggcaagatccggaagaaaagagaagttcgcgatggaggagaagatgatcaacgctctcagaaagtagttaaaacaaagaagaaagaggagaagaaaaaagagccacgagtctcgttcatgactaagaccgaagttgatcatctcgaagacggctatcgttggagaaagtatggccaaaaagcagtcaaaaacagtccttatccgaggagttactatagatgcacgactcagaagtgcaacgtgaagaagagagtggagagatcttaccaagacccaacggtcgtcatcacaacctacgagagtcaacacaaccatccgatcccgaccaatcgtcggacagcaatgttctctggaaccaccgcatctgattataacccatcatcgtctccaatattctccgatctcatcatcaatactccaagaagcttctcaaatgatgatctcttccgtgtgccatacgctagtgtgaacgtgaaccctagttatcatcaacagcaacatggatttcatcaacaggagagtgagttcgagctcttgaaggagatgtttccttcggttttcttcaaacaagagccttgatgatataatataatatagaaacaattttttttctgctaagaaatatagaacaaaacttggatgcataataagtgatgatagtgttatttattttttgcatgtatatattatacatgttttgttaactagctataggatatactggtagtaattaagcataaatatggagcccttcgacttattacaataatttttggtatggaaaaanttngntacatgcctgccttttnnnttnngg

SEQ ID NO: 171 - protein, 326 aa, Arabidopsis thaliana
MSHEIKDLNNYHYTSSYNHYNINNQNMINLPYVSGPSAYNANMISSSQVGFDLPSKNLSPQGAFELGFELSPSSSDFFNPSLDQENGLYNAYNYNSSQKSHEVVGDGCATIKSEVRVSASPSSSEADHHPGEDSGKIRKKREVRDGGEDDQRSQKVVKTKKKEEKKKEPRVSFMTKTEVDHLEDGYRWRKYGQKAVKNSPYPRSYYRCTTQKCNVKKRVERSYQDPTVVITTYESQHNHPIPTNRRTAMFSGTTASDYNPSSSPIFSDLIINTPRSFSNDDLFRVPYASVNVNPSYHQQQHGFHQQESEFELLKEMFPSVFFKQEP

SEQ ID NO: 172 - DNA, 1501 bp, Arabidopsis thaliana
tcgacatcagatttctctcacggattcctaatcatttttattatatttggatatttgctaattcttcccgtgtataaatctcatataaacacgcatcatacatatatattatgtgcagcgtctttgagtttcaagacatggacaacttccaaggagatctaacagacgtcgtacgaggaataggatcaggccacgtgtcaccatctcctggaccaccggaaggtccatctccgagcagcatgtctccgccgccaacatcagatctccacgtggaattcccctccgccgctacttctgccagctgtctcgcaaatcccttcggagacccgttcgtaagcatgaaggatcctctcatccacctcccggccagctacatctccggcgccggtgataataaaagcaacaaaagttttgcaatctttccaaagatttttgaggatgatcatattaagagtcaatgcagtgtcttcccaagaattaagatctcgcaaagtaacaatatccacgatgcctccacgtgtaattctccggccataaccgtctcctctgccgccgtagcagcttcgccgtggggcatgatcaacgttaataccactaacagtccaagaaactgtttacttgtcgataataataacaacacgtcatcatgctcacaggttcagatctcttcttcccctcggaatctcggaattaagagaaggaagagccaggcaaagaaagtggtgtgcataccggctccagccgctatgaacagccggtccagtggagaagttgttccgtctgatctatgggcttggcgaaagtacggtcaaaaacctatcaaaggttctccttatccaaggggttactacagatgtagcagctcaaaaggttgttcagctaggaaacaagtcgaacgtagccgcactgatccaaacatgttagtcattacttacacctctgagcataaccacccatggcctactcaacgcaacgctctcgcaggttccactcgttcctcttcctcctcctctttaaacccttcttccaaatcctcaaccgcagccgccactacttctccctcatccagagttttccaaaacaacagcagcaaagacgaacccaataactccaacttgccttcctcttccactcatcctccttttgacgccgccgcaattaaggaggagaacgtggaagagcgtcaggaaaagatggagttcgattataatgacgttgaaaatacctatagaccggagttgttgcaagagtttcaacatcagccggaggatttctttgccgatctcgacgagcttgagggagattctttgactatgttgctctctcacagtagcggcggaggcaacatggaaaacaaaacgacgattccagacgtttttagtgatttctttgacgacgacgagtcctcaaggtcgttataaatattgttgttaatgtatacatagaaatgaaattattcatgtaattcgttttgtgttaaatgacggtatttgcctttgca

SEQ ID NO: 173 - protein, 436 aa, Arabidopsis thaliana
MCSVFEFQDMDNFQGDLTDVVRGIGSGHVSPSPGPPEGPSPSSMSPPPTSDLHVEFPSAATSASCLANPFGDPFVSMKDPLIHLPASYISGAGDNKSNKSFAIFPKIFEDDHIKSQCSVFPRIKISQSNNIHDASTCNSPAITVSSAAVAASPWGMINVNTTNSPRNCLLVDNNNNTSSCSQVQISSSPRNLGIKRRKSQAKKVVCIPAPAAMNSRSSGEVVPSDLWAWRKYGQKPIKGSPYPRGYYRCSSSKGCSARKQVERSRTDPNMLVITYTSEHNHPWPTQRNALAGSTRSSSSSSLNPSSKSSTAAATTSPSSRVFQNNSSKDEPNNSNLPSSSTHPPFDAAAIKEENVEERQEKMEFDYNDVENTYRPELLQEFQHQPEDFFADLDELEGDSLTMLLSHSSGGGNMENKTTIPDVFSDFFDDDESSRSL

SEQ ID NO: 174 - DNA, 949 bp, Arabidopsis thaliana
gagagagaaagatgggtaggcctccatgctgtgacaagatagggatcaagaaaggaccatggactcctgaagaagatatcattcttgtttcttacattcaagaacatggtcctggaaactggagatcagttcccaccaacactgggttattgagatgcagcaaaagttgtagactgagatggacaaattatctgagacctggaattaaacgtggaaactttactcctcatgaagaaggaatgatcattcacttgcaagccttattgggtaacaaatgggcgtccatagcttcatacctaccacaaagaacggacaatgatatcaagaactactggaacacacatttaaagaagaagctcaacaagtctgacagtgatgagaggagcagatcagagaacattgcgctgcaaacttcttcgacaagaaacaccattaatcatagatctacctatgcttcaagcacagaaaacatttcccgccttgtggagggttggatgagagcgtctccaaagagtagtacaagtactactttcttggaacacaaaatgcagaaccggacaaacaatttcatcgatcatcacagtgatcagtttccatacgagcagcttcaaggttctagggaagagggtcatagcaaaggaatcaacggggatgatgaccagggtataaagaattcagagaataacaacggtgatgatgttcatcatgaagatggtgatcatgaggatgatgatgatcataatgcaacaccaccattgacatttattgagaaatggcttttggaggaaacaagtactactgggggtcaaatggaagagatgagccacttgatggagctctctaatatgctttaattgtgacattttctcctttattttttctttatccttgtgaatcttataaatgagactactaattttatatacacaaataaagaaaccagaaagac

SEQ ID NO: 175 - protein, 280 aa, Arabidopsis thaliana
MGRPPCCDKIGIKKGPWTPEEDIILVSYIQEHGPGNWRSVPTNTGLLRCSKSCRLRWTNYLRPGIKRGNFTPHEEGMIIHLQALLGNKWASIASYLPQRTDNDIKNYWNTHLKKKLNKSDSDERSRSENIALQTSSTRNTINHRSTYASSTENISRLVEGWMRASPKSSTSTTFLEHKMQNRTNNFIDHHSDQFPYEQLQGSREEGHSKGINGDDDQGIKNSENNNGDDVHHEDGDHEDDDDHNATPPLTFIEKWLLEETSTTGGQMEEMSHLMELSNML

SEQ ID NO: 176 - DNA, 1252 bp, Arabidopsis thaliana
tcagaacacaaaagtttggctacagttgtgttctgatagtgatgatcatgatcatcacatgaataagtagaagatatctcttaccttctccttcttctaataagatcagagttttggttcttatttctttgacctctcaaaacaatgggtagatcaccgtgttgtgacaaattgggtttgaagaaaggaccttggacaccagaggaggatcagaaacttttagcttatattgaagaacatggtcatggaagttggcgttcattgcctgagaaagctggtctccatcgatgcggaaagagttgtagactaagatggactaactacctaagacctgacatcaaaagaggcaaattcaacttacaagaagaacaaaccattatccaactccatgctctgttaggaaacagatggtcagcgattgctactcatttgccaaagagaacagacaacgagatcaagaactattggaacactcatttgaagaaacggttagtgaaaatggggattgatccagtgactcataaacccaaaaacgagactcctttatcttctcttggtctatccaagaacgcagctatacttagccacactgctcaatgggaaagtgcaaggcttgaagctgaagcaagactagctagagaatcaaagcttcttcatttacaacattaccaaaccaaaacatcatctcaacctcatcatcatcatggattcactcacaagtcattgttacctaattggacaacaaaaccacacgaagatcaacaacagcttgaatctccgacatctacagtgtcattctctgagatgaaggaatcaatcccggcgaagatagagtttgtcggatcatcaactggtgtgactctgatgaaagaacctgaacacgattggatcaattcaacgatgcacgagtttgaaactacgcagatgggagaaggaatcgaagaagggttcacgggtctcttgctcggtggtgattcaatcgaccggagtttttccggcgataaaaacgagacggccggcgagagtagtggtggtgactgcaactactatgaggacaacaagaactacttggacagcattttcaactttgtagatccttcaccgtcggattcaccgatgttctgaatctaagggttgatatttgttgggaatgtttttgattctttttttagtttctagtttttgtgcttaaactctgattagacaatttttaaactaatccaatttttgcgctaaaaaaaaaaaaaaaaaa

SEQ ID NO: 177 - protein, 326 aa, Arabidopsis thaliana
MGRSPCCDKLGLKKGPWTPEEDQKLLAYIEEHGHGSWRSLPEKAGLHRCGKSCRLRWTNYLRPDIKRGKFNLQEEQTIIQLHALLGNRWSAIATHLPKRTDNEIKNYWNTHLKKRLVKMGIDPVTHKPKNETPLSSLGLSKNAAILSHTAQWESARLEAEARLARESKLLHLQHYQTKTSSQPHHHHGFTHKSLLPNWTTKPHEDQQQLESPTSTVSFSEMKESIPAKIEFVGSSTGVTLMKEPEHDWINSTMHEFETTQMGEGIEEGFTGLLLGGDSIDRSFSGDKNETAGESSGGDCNYYEDNKNYLDSIFNFVDPSPSDSPMF

SEQ ID NO: 178 - DNA, 750 bp, Arabidopsis thaliana
atgatgtcatgtggtgggaagaagccagtgtctaagaaaacaacgccgtgttgcacgaagatggggatgaagagaggaccatggacggtggaggaagacgagattcttgtgagcttcattaagaaagaaggtgaaggacggtggcgatcgcttcctaagagagctggtttactcagatgtggaaagagctgtcgtctacggtggatgaactatctccgaccctcggttaaacgtggaggaattacgtcggacgaggaagatctcatcctccgtcttcaccgcctcctcggcaacaggtggtcattgatcgcgggaaggataccgggaaggactgataatgaaattaagaactattggaacactcatcttcgtaagaaacttttaaggcaaggaattgatcctcaaacccacaagcctcttgatgcaaacaacatccataaaccagaagaagaagtttccggtggacaaaagtaccctctagagcctatttctagttctcatactgatgataccactgttaatggcggggatggagatagcaagaacagtatcaatgtctttggtggtgaacacggctacgaagactttggtttctgctacgacgacaagttctcatcgtttcttaattcgctcatcaacgatgttggtgatccttttggtaatattatcccaatatctcaacctttgcagatggatgattgtaaggatgggattgttggagcgtcgtcttctagcttaggacatgactag

SEQ ID NO: 179 - protein, 249 aa, Arabidopsis thaliana
MMSCGGKKPVSKKTTPCCTKMGMKRGPWTVEEDEILVSFIKKEGEGRWRSLPKRAGLLRCGKSCRLRWMNYLRPSVKRGGITSDEEDLILRLHRLLGNRWSLIAGRIPGRTDNEIKNYWNTHLRKKLLRQGIDPQTHKPLDANNIHKPEEEVSGGQKYPLEPISSSHTDDTTVNGGDGDSKNSINVFGGEHGYEDFGFCYDDKFSSFLNSLINDVGDPFGNIIPISQPLQMDDCKDGIVGASSSSLGHD

SEQ ID NO: 180 - DNA, 2807 bp, Arabidopsis thaliana
cttcgttcttaccgagttccacgagcattagcttcagagaccttgaattggagtgcggttggatcaaaaacagttgagcgaagatgaggattatgattaagggaggtgtttggaagaacaccgaagatgagattctcaaagccgccgtgatgaagtatggtaagaaccaatgggctcggatctcgtctcttctcgttcgtaagtctgctaaacagtgtaaagctcgctggtacgagtggctcgatccatctatcaaaaagactgaatggaccagagaagaagatgagaagcttctacatcttgctaaacttctgcctactcaatggagaactattgctcctattgtgggtcgtacaccatctcaatgtcttgagaggtatgagaagctccttgatgcagcatgcactaaggatgaaaattatgatgcagcggatgatccacgaaaattacgtcctggtgagattgatccgaacccagaagcaaagcctgctcgtcctgatccggtagacatggacgaagatgagaaagaaatgctttctgaagcaagagctagattggctaacacgaggggaaagaaggctaaaagaaaagctagagaaaaacaacttgaggaagctagaaggcttgcttctctgcaaaaaagaagagaactaaaagcagctgggattgatggaaggcataggaaaagaaagagaaagggaatcgactataatgcagaaattccttttgaaaagagggcacctgcgggattttatgatactgcggatgaagatcgtcctgctgatcaagtaaaatttccaactaccattgaagaacttgaaggaaaaagaagagctgatgtagaagcacatttacgcaaacaagatgttgcaaggaataaaattgctcagagacaggatgctccagcagctatattgcaagcaaacaagctgaatgatccggaagttgttaggaagaggtcaaagctgatgttaccaccaccgcagatttcagaccacgagctagaagaaattgctaagatgggctatgccagtgaccttcttgccgagaatgaggagctaacagaaggcagtgctgctactcgtgcacttttggcaaattactcacaaacaccaaggcaaggaatgacacccatgaggacacctcaaagaactcctgctggtaaaggtgatgctattatgatggaagcagaaaacctggccagattaagagactctcagacacctttgctaggaggagaaaatcctgagttgcacccttctgacttcactggggtcactccgagaaagaaggagattcaaacgcctaatccaatgttgaccccttcaatgactcctggtggtgctggtcttactccaagaattggcttgacgccatcaagggatgggtcttctttttctatgacacccaaagggactcccttcagggatgaacttcacattaacgaagacatggacatgcagcaaagtgcaaaacttgagaggcagagacgagaggaagctagaaggagtttacgctctggtttgactgggcttcctcagccaaagaacgagtaccaaatagttgcacaacctcctcctgaggaaagtgaagagccagaagagaaaattgaggaagacatgtcagacaggatagcgagggaaaaggcggaggaagaagcaagacaacaggcattgcttaagaagagatccaaggtcttgcagagagatcttcctagacccccagctgcttcattggcagtaattaggaactcgttgctttcagctgatggagacaaaagttctgttgttcctcctactccgattgaggttgcagataaaatggtaagagaggagcttctacagttgctggagcatgataatgcaaagtatccgcttgatgacaaagctgagaagaagaaaggagccaagaaccgtaccaaccgttctgcttctcaagttcttgcaattgacgattttgatgaaaatgagctccaagaggctgacaaaatgataaaggaggaggggaagtttctgtgtgtgtcaatgggacatgagaacaagacacttgatgattttgtagaagctcacaacacatgcgtgaatgatctcatgtatttccccactcgaagcgcttacgagctctcaagtgttgctgggaacgcggacaaagttgcagcttttcaggaggagatggagaatgtgagaaaaaagatggaggaggatgagaagaaggcagaacacatgaaggccaagtacaaaacttatacaaagggtcatgagaggagggcagagaccgtgtggacccaaatagaggcgacattgaagcaggctgagattggtggaacagaagtagagtgctttaaagcattgaagaggcaagaagagatggctgcatcttttaggaaaaagaatttgcaagaggaagtgataaagcaaaaggaaacagagagtaaactgcagactcgctatgggaatatgttggcaatggttgaaaaagcagaggagataatggtcggtttccgagcacaggcattgaagaaacaagaggatgttgaagattctcacaaactgaaagaagctaagctagccactggagaggaagaggacatagccatagccatggaagcttctgcataaaaacttgagttttgtattgcttacaagttttaaggagacgtagcttgactttgtattggtaagtttttttaatatgagtcatgactttgtaaaaaggttatgatatattctctgtttgtatgctttgcaagagtcaagaaatttgaatgcttcaggatcaaaaaaaaaaaaaaaaaaaaaaaaaaaaaa

SEQ ID NO: 181 - protein, 844 aa, Arabidopsis thaliana
MRIMIKGGVWKNTEDEILKAAVMKYGKNQWARISSLLVRKSAKQCKARWYEWLDPSIKKTEWTREEDEKLLHLAKLLPTQWRTIAPIVGRTPSQCLERYEKLLDAACTKDENYDAADDPRKLRPGEIDPNPEAKPARPDPVDMDEDEKEMLSEARARLANTRGKKAKRKAREKQLEEARRLASLQKRRELKAAGIDGRHRKRKRKGIDYNAEIPFEKRAPAGFYDTADEDRPADQVKFPTTIEELEGKRRADVEAHLRKQDVARNKIAQRQDAPAAILQANKLNDPEVVRKRSKLMLPPPQISDHELEEIAKMGYASDLLAENEELTEGSAATRALLANYSQTPRQGMTPMRTPQRTPAGKGDAIMMEAENLARLRDSQTPLLGGENPELHPSDFTGVTPRKKEIQTPNPMLTPSMTPGGAGLTPRIGLTPSRDGSSFSMTPKGTPFRDELHINEDMDMQQSAKLERQRREEARRSLRSGLTGLPQPKNEYQIVAQPPPEESEEPEEKIEEDMSDRIAREKAEEEARQQALLKKRSKVLQRDLPRPPAASLAVIRNSLLSADGDKSSVVPPTPIEVADKMVREELLQLLEHDNAKYPLDDKAEKKKGAKNRTNRSASQVLAIDDFDENELQEADKMIKEEGKFLCVSMGHENKTLDDFVEAHNTCVNDLMYFPTRSAYELSSVAGNADKVAAFQEEMENVRKKMEEDEKKAEHMKAKYKTYTKGHERRAETVWTQIEATLKQAEIGGTEVECFKALKRQEEMAASFRKKNLQEEVIKQKETESKLQTRYGNMLAMVEKAEEIMVGFRAQALKKQEDVEDSHKLKEAKLATGEEEDIAIAMEASA

SEQ ID NO: 182 - DNA, 407 bp, Arabidopsis thaliana
ccagtagttatggataataccaaccgtcttcgtcttcgtcgcggtcccagtcttaggcaaactaagttcactcgatcccgatatgactctgaagaagtgagtagcatcgaatgggagtttatcagtatgaccgaacaagaagaagatctcatctctcgaatgtacagacttgtcggtaataggtgggatttaatagcaggaagagtcgtaggaagaaaggcaaatgagattgagagatactggattatgagaaactctgactatttttctcacaaacgacgacgtcttaataattctccctttttttctacttctcctcttaatctccaagaaaatctaaaattgtaaagaaatcaaaataaaagctttcaatcataaaagtagaacaaatcttgaatgtcttctca

SEQ ID NO: 183 - protein, 112 aa, Arabidopsis thaliana
MDNTNRLRLRRGPSLRQTKFTRSRYDSEEVSSIEWEFISMTEQEEDLISRMYRLVGNRWDLIAGRVVGRKANEIERYWIMRNSDYFSHKRRRLNNSPFFSTSPLNLQENLKL

SEQ ID NO: 184 - DNA, 920 bp, Arabidopsis thaliana
atggcgaagacgaaatatggagagagacataggaaagggttatggtcacctgaagaagacgagaagctaaggagcttcatcctctcttatggccattcttgctggaccactgttcccatcaaagctgggttacaaaggaatgggaagagctgcagattaagatggattaattacctaagaccagggttaaagagggatatgattagtgcagaagaagaagagactatcttgacgtttcattctcccttgggtaacaagtggtcgcaaatagctaaattcttaccgggaagaacagacaatgagataaagaactattggcactctcatttgaaaaagaaatggctcaagtctcagagcttacaagatgcaaaatctatttcccctccttcgtcttcatcatcatcacttgttgcttgtggagaaagaaatccggaaaccttgatctcgaatcacgtgttctccctccagagacttctagagaacaaatcttcatctccctcacaagaaagcaacggaaataacagccatcaatgttcttctgctcctgagattccaaggcttttcttctctgaatggctttcttcttcatatccccacaccgattattcctctgagtttaccgactctaagcacagtcaagctccaaatgtcgaagagactctctcagcttatgaagaaatgggtgatgttgatcagttccattacaacgaaatgatgatcaacaacagcaactggactcttaacgacattgtgtttggttccaaatgtaagaagcaggagcatcatatttatagagaggcttcagattgtaattcttctgctgaattcttttctccaccaacaacgacgtaaattgcgtttattgtaatgtaaatcaaatttctaaggcaaaaccggaaaaaaaaaaaaaaaaaaaaaaa

SEQ ID NO: 185 - protein, 283 aa, Arabidopsis thaliana
MAKTKYGERHRKGLWSPEEDEKLRSFILSYGHSCWTTVPIKAGLQRNGKSCRLRWINYLRPGLKRDMISAEEEETILTFHSPLGNKWSQIAKFLPGRTDNEIKNYWHSHLKKKWLKSQSLQDAKSISPPSSSSSSLVACGERNPETLISNHVFSLQRLLENKSSSPSQESNGNNSHQCSSAPEIPRLFFSEWLSSSYPHTDYSSEFTDSKHSQAPNVEETLSAYEEMGDVDQFHYNEMMINNSNWTLNDIVFGSKCKKQEHHIYREASDCNSSAEFFSPPTTT

SEQ ID NO: 186 - DNA, 1347 bp, Arabidopsis thaliana
atggaagattacgagcgaataaactcaaactctccaacacatgaagaagattctgatgtacggaaaggtccatggaccgaggaagaagatgcaatcctagtcaacttcgtctctattcatggcgatgctcgttggaaccacatcgctcgttcctctgggctaaagcgaactggtaagagttgtagattaagatggcttaattacttacgtccagatgttagaagaggcaacatcactctcgaagaacaatttatgatcctcaaactccattctctttggggcaataggtggtcgaagattgcgcaatatctaccgggaagaacagataatgaaataaagaattattggagaactcgagtccaaaagcaagccaaacacctaagatgcgatgttaacagtaatcttttcaaggagactatgagaaatgtttggatgccgagattagtggaacgaatcaacgcccaatcattacccaccacgtgtgaacaagtggagtcaatgatcaccgacccaagtcaaccagttaacgaaccgagtccggtcgagccgggtttcgttcaattcagccagaatcatcatcagcaattcgtaccggctacggaattgtcagcaacgtcttcgaattctccggctgagacgttttcggacgttcgaggtggggtggtgaacgggtcaggttatgatccgtcgggtcaaacgggtttcggagagttcaacgattggggctgtgttggtggggacaacatgtggactgacgaggagagtttttggttcttgcaggaccagttctgccccgatacgacatcgtattcgtataattaaggaaatatacgattactatacgtaacgaggaattcaattgcgtcacgtttggtgtaatattcattcgtgcgtgatgccaattttagatacggccttggtatacgaatctttgacttaattattatcttttcttttcctctcttgttttaaacccctgattaaattaagatttgatcatcagacgaggatatttgtgattcactgatttgtgatattgatatatgtgaattatttgatataacgttttaaaaaccaacaaaaaaaaaaaatcattccaaggaaaagttcttaattttgatactcgaaaagagcgtagactgactcgaatcagttcatattttctttggttcgttttatttacgacaaaattcactaacaaaaattaaaaaacgacaaaacgaaaatatgactaaatttatttttttgtcagttaaccactgattataggttgaaattgtcacaacacatgatttatcttgatagaaatttagtagtccagaatgctgcatggttgatcctaagaaa

SEQ ID NO: 187 - protein, 273 aa, Arabidopsis thaliana
MEDYERINSNSPTHEEDSDVRKGPWTEEEDAILVNFVSIHGDARWNHIARSSGLKRTGKSCRLRWLNYLRPDVRRGNITLEEQFMILKLHSLWGNRWSKIAQYLPGRTDNEIKNYWRTRVQKQAKHLRCDVNSNLFKETMRNVWMPRLVERINAQSLPTTCEQVESMITDPSQPVNEPSPVEPGFVQFSQNHHQQFVPATELSATSSNSPAETFSDVRGGVVNGSGYDPSGQTGFGEFNDWGCVGGDNMWTDEESFWFLQDQFCPDTTSYSYN

SEQ ID NO: 188 - DNA, 963 bp, Arabidopsis thaliana
atgggtcggattccatgttgtgaaaaggagaatgtgaagagaggacaatggactcctgaagaagacaacaaattggcttcttatattgctcaacatggtactcgtaattggcgtctcatccctaagaatgctgggttgcaaagatgtgggaagagttgtaggctgcgatggacaaactatctgcgtccggatttgaaacatggccagttctcggaggctgaagaacatatcattgtcaagtttcactctgttcttggtaaccggtggtcgttgattgcggcgcaacttcctggtcggacagacaacgatgtgaaaaattattggaacacgaagctgaagaagaagttgtcaggaatgggaatagatccggtgacccacaagcctttctcgcatctaatggcagagatcaccactacacttaatcctcctcaggtttctcacctagccgaagctgccctcggctgtttcaaggacgagatgcttcacttgctcaccaagaaacgtgttgacctaaaccaaatcaacttttcaaaccataaccctaacccaaacaactttcacgagattgctgataatgaagctggtaagataaagatggatggtttggaccatgggaatgggataatgaagttatgggacatgggtaatggattctcatatggatcctcttcgtcttcgtttgggaatgaagaaagaaatgatggatcagcgtctcctgccgttgcagcttggaggggtcacggaggaatacgtaccgcggtagctgaaaccgcggcagcggaggaggaggagagaaggaagctgaagggagaagtggttgatcaagaggagattggatctgaaggaggaagaggagatggaatgacgatgatgaggaaccatcatcatcatcaacatgtgtttaatgtggataatgtcttgtgggatttacaagctgatgatctcatcaatcatatggtttga

SEQ ID NO: 189 - protein, 320 aa, Arabidopsis thaliana
MGRIPCCEKENVKRGQWTPEEDNKLASYIAQHGTRNWRLIPKNAGLQRCGKSCRLRWTNYLRPDLKHGQFSEAEEHIIVKFHSVLGNRWSLIAAQLPGRTDNDVKNYWNTKLKKKLSGMGIDPVTHKPFSHLMAEITTTLNPPQVSHLAEAALGCFKDEMLHLLTKKRVDLNQINFSNHNPNPNNFHEIADNEAGKIKMDGLDHGNGIMKLWDMGNGFSYGSSSSSFGNEERNDGSASPAVAAWRGHGGIRTAVAETAAAEEEERRKLKGEVVDQEEIGSEGGRGDGMTMMRNHHHHQHVFNVDNVLWDLQADDLINHMV

SEQ ID NO: 190 - DNA, 624 bp, Arabidopsis thaliana
atggatccacttaaacaggttcaagaagaaatcaattcattgaggtggaaacgttggacactttcagaggatttgaaactaaaagagcttgtggctgtgtatggtcctcaaaaatggccgcacattggaaagcaaatgcaaggcagatcaggtaagtcttgtagatcaaggtggtataaccatttggatccaaggattaggaatgatgtttttagtgacgaggaagaaaaattgctaatcaaagcttacaacgaatggggttgcaaatggtctaagattgctaggcttttccctggaagaacagacagacaaatgcagagactatggcgattgtttgtacgtgataaaagtacaaagatgccacaagaggaaaccactcacctcgaagctaagtatcgcaacgaaacaatgaattacttagctcatcaacgtcgcttctataacatccctaaaggtttcttggcaatgtccacaccgcctgtctccaactctcaaccatcatcatcatcatcatcaccatcattaccatccaaacccgaagatgcaaaggccaatatacccgcaaagtatatagactttctcgggttaggagattctgaaaagaaaaagaagaaactactatag

SEQ ID NO: 191 - protein, 207 aa, Arabidopsis thaliana
MDPLKQVQEEINSLRWKRWTLSEDLKLKELVAVYGPQKWPHIGKQMQGRSGKSCRSRWYNHLDPRIRNDVFSDEEEKLLIKAYNEWGCKWSKIARLFPGRTDRQMQRLWRLFVRDKSTKMPQEETTHLEAKYRNETMNYLAHQRRFYNIPKGFLAMSTPPVSNSQPSSSSSSPSLPSKPEDAKANIPAKYIDFLGLGDSEKKKKKLL

SEQ ID NO: 192 - DNA, 998 bp, Arabidopsis thaliana
agtgaccaccctgctggttaatcaacaccaagagaccttgtaatatataagttaggaagatgagagagaagtgggaaatgaaaagagatgaaatgggacatcgatgttgtggaaaacacaaagtgaagagaggtctttggtctccagaggaagacgagaagcttcttcgttatatcaccactcatggtcatcctagttggagttccgttccaaagcttgccgggttgcagagatgtgggaagagttgcagattaaggtggataaactatctaaggcctgatctgaggagaggttcgtttaatgaggaagaagagcagattatcatcgacgtacatcgtattcttggtaacaaatgggctcagattgctaagcacttacctggacgcactgataatgaagtcaagaacttttggaactcatgcattaagaagaaacttctttctcaaggcttagatccttctacacataatcttatgccttcacacaaaagatcttcttcttcaaacaataataatatccccaagccaaacaaaacgacgtccatcatgaagaaccctactgatcttgatcaatcaaccactgctttttcaatcacaaacatcaatccacccacttccactaaaccaaacaaacttaaatctcctaaccagactacaatcccatctcaaaccgtgatccctatcaatgataacatgtcaagtactcaaaccatgatccctatcaatgatcccatgtcaagtcttttagatgatgagaatatgattcctcactggtcagatgttgatggaatggcgatccacgaagctccgatgttgcctagtgataaggcagtagtgggagtggatgatgatgatctcaacatggacattttgtttaacactccttcttcttctgcttttgatcctgattttgcttccattttctcctctgcaatgtctatcgatttcaatcccatggatgatcttggcagctggaccttttagcttttactctacagc

SEQ ID NO: 193 - protein, 307 aa, Arabidopsis thaliana
MREKWEMKRDEMGHRCCGKHKVKRGLWSPEEDEKLLRYITTHGHPSWSSVPKLAGLQRCGKSCRLRWINYLRPDLRRGSFNEEEEQIIIDVHRILGNKWAQIAKHLPGRTDNEVKNFWNSCIKKKLLSQGLDPSTHNLMPSHKRSSSSNNNNIPKPNKTTSIMKNPTDLDQSTTAFSITNINPPTSTKPNKLKSPNQTTIPSQTVIPINDNMSSTQTMIPINDPMSSLLDDENMIPHWSDVDGMAIHEAPMLPSDKAVVGVDDDDLNMDILFNTPSSSAFDPDFASIFSSAMSIDFNPMDDLGSWTF

SEQ ID NO: 194 - DNA, 1209 bp, Arabidopsis thaliana
atgttttcttctcattccttgtcctataagctaagctctttgtctactgaagcaagtgcctcttctggtaacaacacactcagtaccatccaagaattcagtggctttcacaatgtgatttctagtgtttgtacacacacagagactcacaagcctaagaaaaagagaggccttcctggaaatcctgatccagatgcagaagtgatcgcattatcaccaaagacacttcttgcaacaaacagattcgtttgtgagatatgcaacaaagggtttcaaagagatcagaatctacagcttcacaggagaggccacaatcttccatggaagctgaaacagaagaacaccaaagaacaacaaaagaagaaagtctacgtgtgcccagagacaaactgtgctcatcaccatccatctagagctcttggggatctcacagggatcaagaaacacttttgcaggaaacatggagagaagaaatggaaatgtgaaaagtgttcaaagttctatgctgttcaatctgattggaaagctcataccaagatctgtggtactagagattatagatgtgactgcggcactcttttctcgaggaaagacactttcataacgcatagagcgttttgtgatgcattagcagaagaaagtgcaagactccactcaacttcttcctccaatctcacaaaccctaaccctaatttccaaggccatcattttatgttcaataaatcttcctccttgctcttcacgtcatcacctcttttcatcgaaccatcactttccaccgccgctctttcaacgcctccaacggcagctctttccgcgacggctcttctccaaaaggccacctctctcagctccactactttcggcggcggaggacagactcgatccattggtcatcaccgacatttgacgaacgtcaacgagtttcttggtgttgaccgagtcatgatgacgtcagcttcttcgtctgagtacgaccagttagttgttgatgggtttacgtccacgtggcagaaagctgaccgtttgaccagagactttcttggactcacgggtcatgggggacacgttagcgtcagacctggggatatgctagagtacgcgggtggagtggcgtttcctatgtcggcgtacgataccgaatctcatgatcactcgtttcagaaggcttacgatcatctgggattctcaggggcccatcgtatgtaa

SEQ ID NO: 195 - protein, 402 aa, Arabidopsis thaliana
MFSSHSLSYKLSSLSTEASASSGNNTLSTIQEFSGFHNVISSVCTHTETHKPKKKRGLPGNPDPDAEVIALSPKTLLATNRFVCEICNKGFQRDQNLQLHRRGHNLPWKLKQKNTKEQQKKKVYVCPETNCAHHHPSRALGDLTGIKKHFCRKHGEKKWKCEKCSKFYAVQSDWKAHTKICGTRDYRCDCGTLFSRKDTFITHRAFCDALAEESARLHSTSSSNLTNPNPNFQGHHFMFNKSSSLLFTSSPLFIEPSLSTAALSTPPTAALSATALLQKATSLSSTTFGGGGQTRSIGHHRHLTNVNEFLGVDRVMMTSASSSEYDQLVVDGFTSTWQKADRLTRDFLGLTGHGGHVSVRPGDMLEYAGGVAFPMSAYDTESHDHSFQKAYDHLGFSGAHRM

SEQ ID NO: 196 - DNA, 1038 bp, Arabidopsis thaliana
atgaaatctctgtagtttttttttgttcctttcttaaatttcgaaagaaagacatttattaaaccaaaataactctttagatcattgcaaggaaaaatgttgaaaagtgcaagtccaatggcattctacgatatcggagagcagcaatactctactttcgggtacattttaagcaaacctgggaacgcaggagcttacgagattgacccttcgatcccaaacatcgacgatgcgatctacggctcagatgagttccgtatgtacgcttacaaaatcaaacggtgtcctcgtactcgtagccacgactggacggagtgtccctacgctcaccgtggcgagaaagccacacgccgtgatcctcgccgttacacttactgtgcagtcgcatgcccggctttccgaaatggcgcatgccaccgtggcgactcatgcgaattcgcacatggcgtattcgagtactggctccacccggcgcgttaccgaacacgcgcatgtaacgccgggaacttgtgtcagaggaaagtgtgtttctttgcccacgcgccggagcagctaaggcagtctgaaggaaagcacaggtgcaggtacgcatataggccggtgagggctagaggtggtggaaacggcgatggagtgacgatgagaatggacgacgagggttacgacacgtcacggtctccggtgagaagcgggaaagatgatttagatagtaacgaggagaaggtgttgttgaagtgttggagtcggatgagcattgtggatgatcattatgagccgtccgatttggatttggatttgtcacactttgattggatctcagagttggtcgattaaatttgggaaatcaaagcagagaacaaaagaaacccgataaataaagtggattttgttaaaatccacaagatcaagattcaagatgagagatcttgtcatgtatatggtaaatttaattgtaatgatttattgcaatgtcgcaaaagaagttacttctctttgcatgtaaacagattcttgatcttctataagtctttgtattaa

SEQ ID NO: 197 - protein, 245 aa, Arabidopsis thaliana
MLKSASPMAFYDIGEQQYSTFGYILSKPGNAGAYEIDPSIPNIDDAIYGSDEFRMYAYKIKRCPRTRSHDWTECPYAHRGEKATRRDPRRYTYCAVACPAFRNGACHRGDSCEFAHGVFEYWLHPARYRTRACNAGNLCQRKVCFFAHAPEQLRQSEGKHRCRYAYRPVRARGGGNGDGVTMRMDDEGYDTSRSPVRSGKDDLDSNEEKVLLKCWSRMSIVDDHYEPSDLDLDLSHFDWISELVD

SEQ ID NO: 198 - DNA, 723 bp, Arabidopsis thaliana
atggacgtctacggcatgtcttcaccggacttgcttcgtatcgacgaccttctcgatttctccaacgacgaaatcttctcttcctcttccaccgtcacttcctccgccgcttcctccgccgcttcttccgaaaaccctttcagctttccttcttccacctacacttctcctactctcctcaccgacttcactcacgatctctgcgttcccagtgacgacgcagctcatctcgaatggttatcgcgattcgttgacgattcattctccgatttcccagcaaatcctttaaccatgaccgttagacccgagatttcattcaccggaaaacctagaagtcgccgatcaagagcaccagcaccttccgtagctggaacttgggctccgatgtctgaatcagagctttgtcactccgtcgctaaacctaaaccgaagaaagtctacaacgctgaatcggttacggcggatggagcgaggcggtgcacgcactgtgcctcggagaaaacgccacagtggagaactggaccgcttggacctaaaacactttgtaacgcttgtggagttcgttacaaatcagggaggcttgtaccggaatacagaccggcgtcgagtccgacgtttgtattgactcagcattcgaactctcatcggaaagttatggagctccggcgacagaaggaacaacaagaatcttgcgttcgaattccgccgtttcagccgcagtaa

SEQ ID NO: 199 - protein, 240 aa, Arabidopsis thaliana
MDVYGMSSPDLLRIDDLLDFSNDEIFSSSSTVTSSAASSAASSENPFSFPSSTYTSPTLLTDFTHDLCVPSDDAAHLEWLSRFVDDSFSDFPANPLTMTVRPEISFTGKPRSRRSRAPAPSVAGTWAPMSESELCHSVAKPKPKKVYNAESVTADGARRCTHCASEKTPQWRTGPLGPKTLCNACGVRYKSGRLVPEYRPASSPTFVLTQHSNSHRKVMELRRQKEQQESCVRIPPFQPQ

SEQ ID NO: 200 - DNA, 795 bp, Arabidopsis thaliana
atggacgtctatggcttatcttcaccagacttacttcgaatcgacgaccttcttgatttctccaacgaagacatcttctccgcttcttcttccggtggttccaccgccgctacttcctcttcttctttccctcctcctcaaaaccctagtttccaccaccaccatctcccttcctccgccgatcatcactccttcctccacgacatttgcgttcccagtgatgacgcagctcatcttgaatggctttcgcaattcgtggacgattctttcgctgattttccggcgaatccattaggaggaactatgacttctgtcaaaactgaaacttcctttccggggaaaccaagaagcaaacgatcaagagctcctgctcctttcgccggaacatggtctccgatgccactggaatccgagcatcagcagcttcactccgccgccaaattcaagccaaagaaagaacaatccggcggaggaggaggaggaggaggaagacatcagtcatcgtcatcggagactacggaaggaggaggaatgaggagatgtactcactgtgcatcggagaaaacgccacagtggaggacaggaccacttggacctaaaacactatgtaacgcttgtggagtccggtttaaatccggtagacttgtaccggaatatagaccggcttcgagtcctacttttgttttgactcagcattcaaactctcaccggaaagtgatggagcttcgacggcagaaagaagttatgagacaaccacaacaagttcaacttcatcaccaccaccacccgttttag

SEQ ID NO: 201 - protein, 264 aa, Arabidopsis thaliana
MDVYGLSSPDLLRIDDLLDFSNEDIFSASSSGGSTAATSSSSFPPPQNPSFHHHHLPSSADHHSFLHDICVPSDDAAHLEWLSQFVDDSFADFPANPLGGTMTSVKTETSFPGKPRSKRSRAPAPFAGTWSPMPLESEHQQLHSAAKFKPKKEQSGGGGGGGGRHQSSSSETTEGGGMRRCTHCASEKTPQWRTGPLGPKTLCNACGVRFKSGRLVPEYRPASSPTFVLTQHSNSHRKVMELRRQKEVMRQPQQVQLHHHHHPF

SEQ ID NO: 202 - DNA, 1099 bp, Arabidopsis thaliana
acagttgtacaaaaaagcaggcgtggtaccggaccggtaattcccggggatatcgtcgtacccacgcgtccgctcgacacgcaacttccttcctcttcagactcctctgactttactatatataacacacacactttcatttcttgtttcttcaaatcaaatcttttcatttacaattatctttcttctcaatttagaacttagtagctagtcttcaagataatggcacttgaaactcttacttctccaagattatcttctccgatgccgactctgtttcaagattcagcactagggtttcatggaagcaaaggcaaacgatctaagcgatcaagatctgaattcgaccgtcagagtctcacggaggatgaatatatcgctttatgtctcatgcttcttgctcgcgacggagatagaaaccgtgaccttgacctgccttcttcttcgtcttcacctcctctgcttcctcctcttcctactccgatctacaagtgtagcgtctgtgacaaggcgttttcgtcttaccaggctcttggtggacacaaggcaagtcaccggaaaagcttttcgcttactcaatctgccggaggagatgagctgtcgacatcgtcggcgataaccacgtctggtatatccggtggcgggggaggaagtgtgaagtcgcacgtttgctctatctgtcataaatcgttcgccaccggtcaagctctcggcggccacaaacggtgccactacgaaggaaagaacggaggcggtgtgagtagtagcgtgtcgaattctgaagatgtggggtctacaagccacgtcagcagtggccaccgtgggtttgacctcaacataccgccgataccggaattctcgatggtcaacggagacgaagaggtgatgagtcctatgccggcgaagaaactccggtttgacttcccggagaaaccctaaacataaacctaggaaaaactttacagaattcattttataggaaattgttttactgtatatacaaatatcgattttgattgatgttcttcttcactgaaaaattatgattctttgttgtatacttgatgtttctgaaaaagatataactttttattaaaaa

SEQ ID NO: 203 - protein, 238 aa, Arabidopsis thaliana
MALETLTSPRLSSPMPTLFQDSALGFHGSKGKRSKRSRSEFDRQSLTEDEYIALCLMLLARDGDRNRDLDLPSSSSSPPLLPPLPTPIYKCSVCDKAFSSYQALGGHKASHRKSFSLTQSAGGDELSTSSAITTSGISGGGGGSVKSHVCSICHKSFATGQALGGHKRCHYEGKNGGGVSSSVSNSEDVGSTSHVSSGHRGFDLNIPPIPEFSMVNGDEEVMSPMPAKKLRFDFPEKP

SEQ ID NO: 204 - DNA, 775 bp, Arabidopsis thaliana
ctcacgcaacttcctctcttctcaagattcttctccatacttcaccttcttctatatatctctctgctctcaaattaggttttaaattttctatagcaatggcgcttgaagctcttaattcaccaagattggtcgaggatcccttaagattcaatggcgttgagcagtggaccaaatgtaagaaacgatccaaacgttcgagatctgatcttcatcataaccaccgtctcactgaggaagagtatctagctttctgtctcatgcttcttgctcgggatggcggcgatcttgactctgtgacggttgcggagaagccgagttataagtgtggcgtttgttacaagacgttttcgtcttaccaagctctcggcggtcataaagcgagccaccggagcttatacggtggtggagagaatgataaatcgacaccatccaccgccgtgaaatctcacgtttgttcggtttgcgggaaatctttcgccaccggtcaagctctcggcggccacaagcggtgccactacgatggtggcgtttcgaactcggaaggtgtggggtctactagccacgtcagcagtagtagccaccgtggatttgaccttaatattataccggtgcagggattttcgccggacgacgaagtgatgagtccgatggcgactaagaagcctcgcctgaagtaagtctttgttgaagacctggaagtttatcaaatgtaaatatcaaatttcaatttcaaggaacagttttgttgattctattaccaatacacaatacg

SEQ ID NO: 205 - protein, 193 aa, Arabidopsis thaliana
MALEALNSPRLVEDPLRFNGVEQWTKCKKRSKRSRSDLHHNHRLTEEEYLAFCLMLLARDGGDLDSVTVAEKPSYKCGVCYKTFSSYQALGGHKASHRSLYGGGENDKSTPSTAVKSHVCSVCGKSFATGQALGGHKRCHYDGGVSNSEGVGSTSHVSSSSHRGFDLNIIPVQGFSPDDEVMSPMATKKPRLK

SEQ ID NO: 206 - DNA, 817 bp, Arabidopsis thaliana
aatacaccacacacttcactctttcttcatcttcttcttcttaaatagctcgaaatcacatctcacagaattaaatcttatggctctcgagactctcaattctccaacagctaccaccaccgctcggcctcttctccggtatcgtgaagaaatggagcctgagaatctcgagcaatgggctaaaagaaaacgaacaaaacgtcaacgttttgatcacggtcatcagaatcaagaaacgaacaagaaccttccttctgaagaagagtatctcgctctttgtctcctcatgctcgctcgtggctccgccgtacaatctcctcctcttcctcctctaccgtcacgtgcgtcaccgtccgatcaccgagattacaagtgtacggtctgtgggaagtccttttcgtcataccaagccttaggtggacacaagacgagtcaccggaaaccgacgaacactagtatcacttccggtaaccaagaactgtctaataacagtcacagtaacagcggttccgttgttattaacgttaccgtgaacactggtaacggtgttagtcaaagcggaaagattcacacttgctcaatctgtttcaagtcgtttgcgtctggtcaagccttaggtggacacaaacggtgtcactatgacggtggcaacaacggtaacggtaacggaagtagcagcaacagcgtagaactcgtcgctggtagtgacgtcagcgatgttgataatgagagatggtccgaagaaagtgcgatcggtggccaccgtggatttgacctaaacttaccggctgatcaagtctcagtgacgacttcttaa

SEQ ID NO: 207 - protein, 245 aa, Arabidopsis thaliana
MALETLNSPTATTTARPLLRYREEMEPENLEQWAKRKRTKRQRFDHGHQNQETNKNLPSEEEYLALCLLMLARGSAVQSPPLPPLPSRASPSDHRDYKCTVCGKSFSSYQALGGHKTSHRKPTNTSITSGNQELSNNSHSNSGSVVINVTVNTGNGVSQSGKIHTCSICFKSFASGQALGGHKRCHYDGGNNGNGNGSSSNSVELVAGSDVSDVDNERWSEESAIGGHRGFDLNLPADQVSVTTS

SEQ ID NO: 208 - DNA, 727 bp, Arabidopsis thaliana
accaaactcaaaaaacacaaaccacaagaggatcatttcattttttattgtttcgttttaatcatcatcatcagaagaaaaatggttgcgatatcggagatcaagtcgacggtggatgtcacggcggcgaattgtttgatgcttttatctagagttggacaagaaaacgttgacggtggcgatcaaaaacgcgttttcacatgtaaaacgtgtttgaagcagtttcattcgttccaagccttaggaggtcaccgtgcgagtcacaagaagcctaacaacgacgctttgtcgtctggattgatgaagaaggtgaaaacgtcgtcgcatccttgtcccatatgtggagtggagtttccgatgggacaagctttgggaggacacatgaggagacacaggaacgagagtggggctgctggtggcgcgttggttacacgcgctttgttgccggagcccacggtgactacgttgaagaaatctagcagtgggaagagagtggcttgtttggatctgagtctagggatggtggacaatttgaatctcaagttggagcttggaagaacagtttattgattttatttattttccttaaattttctgaatatatttgtttctctcattctttgaatttttcttaatattctagattatacatacatccgcagatttaggaaactttcatagagtgtaatcttttctttctgtaaaaatatattttacttgtagcaaa

SEQ ID NO: 209 - protein, 162 aa, Arabidopsis thaliana
MVAISEIKSTVDVTAANCLMLLSRVGQENVDGGDQKRVFTCKTCLKQFHSFQALGGHRASHKKPNNDALSSGLMKKVKTSSHPCPICGVEFPMGQALGGHMRRHRNESGAAGGALVTRALLPEPTVTTLKKSSSGKRVACLDLSLGMVDNLNLKLELGRTVY

SEQ ID NO: 210 - DNA, 628 bp, Arabidopsis thaliana
cctagaagtcactaagtcgattcaaaatggttgcgagaagtgaggaaattgtgatagtggaagaagatacgactgcgaaatgtttgatgttgttatcaagagtcggagaatgcggcggcggctgcgggggagatgaacgtgttttccgatgcaagacttgtcttaaagagttctcatcgtttcaagctttgggaggtcatcgtgcaagccacaagaaacttatcaacagtgacaatccatcacttcttggatccttgtccaacaagaaaactaaaacgtctcatccttgtccgatatgtggagtgaagtttccgatgggacaagctcttggtggtcacatgaggagacataggaacgagaaagtctcaggctcgttggttacacgttcttttctaccggagacgacgacggtgacggctttgaagaaatttagtagtgggaagagagtggcttgtttggatttggacttagattcgatggagagtttggtcaattggaagttggagttgggaagaacgatttcttggagttaagtttttgggttgtatacagtttcacatgattttgtaatctttgttgatccaattatcgtaccgatcgatgtgaatattattttgatacaataaaa

SEQ ID NO: 211 - protein, 168 aa, Arabidopsis thaliana
MVARSEEIVIVEEDTTAKCLMLLSRVGECGGGCGGDERVFRCKTCLKEFSSFQALGGHRASHKKLINSDNPSLLGSLSNKKTKTSHPCPICGVKFPMGQALGGHMRRHRNEKVSGSLVTRSFLPETTTVTALKKFSSGKRVACLDLDLDSMESLVNWKLELGRTISWS

SEQ ID NO: 212 - DNA, 615 bp, Arabidopsis thaliana
atgcagaacaaacacaaatgcaagctctgttccaagagtttctgtaatggcagagcacttggtggtcacatgaagtctcacttggtctcatctcagtcttcagctcggaagaaactaggtgactcggtctattcttcttcttcctcttcctccgatggtaaagcgctcgcctacgggttacgagagaacccgaggaagagtttccgggtctttaatccggatcctgagtcatccacaatttacaacagtgagacagagaccgaacctgaatccggagacccggttaagaaacgggtcagaggagatgtttcaaagaagaagaagaagaaggcaaagagtaagagagtgtttgagaactcgaagaagcaaaagacaattcacgagtcaccagaaccagcgagttctgtctctgatggttctcctgaacaagatttagctatgtgcttgatgatgctgtcaagagattcaagggagctcgagattaaactgaaaaaaccggaggaagagaggaagccggaaaaaagacatttccctgagctccgtcgctgtatgatagatctgaatcttcctccgccgcaagaagctgaagctgtcaccgtcgtttcagccatataa

SEQ ID NO: 213 - protein, 204 aa, Arabidopsis thaliana
MQNKHKCKLCSKSFCNGRALGGHMKSHLVSSQSSARKKLGDSVYSSSSSSSDGKALAYGLRENPRKSFRVFNPDPESSTIYNSETETEPESGDPVKKRVRGDVSKKKKKKAKSKRVFENSKKQKTIHESPEPASSVSDGSPEQDLAMCLMMLSRDSRELEIKLKKPEEERKPEKRHFPELRRCMIDLNLPPPQEAEAVTVVSAI

SEQ ID NO: 214 - DNA, 855 bp, Arabidopsis thaliana
atgggtcaagatgaggttgggagtgatcagacgcaaatcataaaagggaaacgtacgaagcgacaaagatcgtcttcgacgtttgtggtgacggcggcgacaacagtgacttcaacaagttcatcggccggtggaagtggaggagaaagagctgtttcagatgaatacaactcggcggtttcgtctccggtgactactgattgtacgcaagaagaagaagacatggcgatttgtctcatcatgttagctcgtgggacagttcttccatcgccggatctcaagaactcgagaaaaattcatcagaagatttcgtcggagaattctagtttctatgtgtacgagtgtaaaacgtgtaaccggacgttttcgtcgttccaagcacttggtggacacagagcgagccacaagaagccgaggacgtcgactgaggaaaagactagactacccctgacgcaacccaagtctagtgcatcagaagaagggcaaaacagtcatttcaaagtttccggctcagccctagcttcacaggcaagtaacatcatcaacaaggcaaacaaagtacacgagtgttccatctgcggttctgagttcacttccgggcaagctctcggtggtcacatgaggcggcacaggacagccgtaaccacgattagccccgttgcagccaccgcagaagtaagcagaaacagtacagaggaagagattgagatcaatataggccgttcgatggaacagcagaggaaatatctaccgttggatcttaatctaccagcaccagaagatgatctaagagagtcaaagtttcaagggatagtattctcagcaacaccagcgttaatagattgtcattactag

SEQ ID NO: 215 - protein, 284 aa, Arabidopsis thaliana
MGQDEVGSDQTQIIKGKRTKRQRSSSTFVVTAATTVTSTSSSAGGSGGERAVSDEYNSAVSSPVTTDCTQEEEDMAICLIMLARGTVLPSPDLKNSRKIHQKISSENSSFYVYECKTCNRTFSSFQALGGHRASHKKPRTSTEEKTRLPLTQPKSSASEEGQNSHFKVSGSALASQASNIINKANKVHECSICGSEFTSGQALGGHMRRHRTAVTTISPVAATAEVSRNSTEEEIEINIGRSMEQQRKYLPLDLNLPAPEDDLRESKFQGIVFSATPALIDCHY

SEQ ID NO: 216 - DNA, 966 bp, Arabidopsis thaliana
  misc_feature (915)..(915): n is a, c, g, or t
atctctctctctctctctaagagacagacagacatagatatatcttagatttttcccaggggaaaaaacatagccaaaaagaaagagcttgcacatatggagagatcaaacagcatagagttgaggaacagcttctatggccgtgcaagaacttcaccatggagctatggagattatgataattgccaacaggatcatgattatcttctagggttttcatggccaccaagatcctacacttgcagcttctgcaaaagggaattcagatcggctcaagcacttggtggccacatgaatgttcacagaagagacagagcaagactcagattacaacagtctccatcatcatcttcaacaccttctcctccttaccctaaccctaattactcttactcaaccatggcaaactctcctcctcctcatcattctcctctaaccctatttccaaccctttctcctccatcctcaccaagatatagggcaggtttgatccgttccttgagccccaagtcaaaacatacaccagaaaacgcttgtaagactaagaaatcatctcttttagtggaggctggagaggctacaaggttcaccagtaaagatgcttgcaagatcctgaggaatgatgaaatcatcagcttggagcttgagattggtttgattaacgaatcagagcaagatctggatctagaactccgtttgggtttcgcttaattagatggtaataactttatccataaaggattcgaagttcacaattctagaagatatgatgcttctctaaggttaattagtttcatccatatgaaattctctaagcttgctatttagtagaacgttatagttgattatatgattatagtataagctataagcttgcgttagatgttatataatatgtatgcgcttgttaccgtntttatgtatgacaatggatacaattttgtctccttaattattgtttatctc

SEQ ID NO: 217 - protein, 204 aa, Arabidopsis thaliana
MERSNSIELRNSFYGRARTSPWSYGDYDNCQQDHDYLLGFSWPPRSYTCSFCKREFRSAQALGGHMNVHRRDRARLRLQQSPSSSSTPSPPYPNPNYSYSTMANSPPPHHSPLTLFPTLSPPSSPRYRAGLIRSLSPKSKHTPENACKTKKSSLLVEAGEATRFTSKDACKILRNDEIISLELEIGLINESEQDLDLELRLGFA

SEQ ID NO: 218 - DNA, 543 bp, Arabidopsis thaliana
atgtggaaccctaacaaaattgaagaattggaggatgatgatgaatcttgggaagtcaaagcctttgagcaagacactaaaggcaacatctctggtaccacttggcctccaagatcttacacttgcaatttctgccgccgtgagttccgttctgctcaagccttaggcggtcacatgaatgtccaccgccgtgaccgcgcctcatctagggctcatcaaggttccaccgttgcggctgcggctagaagcggccacggggggatgttactcaattcttgtgctccgccgttgcctacaacgacacttataatacaatccacggcgagtaacattgaaggtttgtcccatttctaccaactgcaaaaccctagtggcatttttggtaattctggtgacatggtgaatctttatgtagaagttcctcctcggcttattgaatattcgacaggagatgatgagagcattggctcgatgaaagaagcgacaggaacatcagtggatgagcttgatcttgaacttcggctagggcaccatccaccgtga

SEQ ID NO: 219 - protein, 180 aa, Arabidopsis thaliana
MWNPNKIEELEDDDESWEVKAFEQDTKGNISGTTWPPRSYTCNFCRREFRSAQALGGHMNVHRRDRASSRAHQGSTVAAAARSGHGGMLLNSCAPPLPTTTLIIQSTASNIEGLSHFYQLQNPSGIFGNSGDMVNLYVEVPPRLIEYSTGDDESIGSMKEATGTSVDELDLELRLGHHPP

SEQ ID NO: 220 - DNA, 977 bp, Arabidopsis thaliana
ataaaaaacccttcatacaatataaaatttctttagacatacaatatattatactattacagatgcaatgcatcattagttacaaactattaaactaaatatcccccgtctctctcttgctatataaagaagatcatttacacatctccttaagcaaattaaacccatcgataaacacatacgttcacacatatatgtctataaatccgacaatgtctcgtactggcgaaagttcttcaggttcgtcctccgacaagacgataaagctattcggcttcgaactcatcagcggcagtcgtacgccggaaatcacgacggcggaaagcgtgagctcgtccacaaacacgacgtcgttaacagtgatgaaaagacacgagtgccaatactgcggtaaagagtttgcaaattctcaagccttaggaggtcaccaaaacgctcacaagaaggagaggttgaagaagaagaggcttcagcttcaagctcggcgagccagcatcggctattatctcaccaaccaccaacaacccataacgacgtcatttcagagacaatacaaaacgccgtcgtattgtgcattctcctccatgcacgtgaataatgatcagatgggtgtgtacaacgaagattggtcgtcgaggtcgtcgcagattaacttcggtaataatgacacgtgccaagatcttaatgaacaaagcggtgagatgggtaagctgtacggtgttcgaccgaacatgattcagttccagagagatctgagttctcgttctgatcagatgagaagtattaactcgctggatcttcatctaggttttgccggagatgcggcataacaaattaaagagagatatatgattaagattatatgtactatagtggcgtatttcattgggatcatgaaggggaaaaaacgagacatatagtattcttgatgcaatttgagttttgtaatttatttaggtttatgtatgttttcgaag

SEQ ID NO: 221 - protein, 211 aa, Arabidopsis thaliana
MSINPTMSRTGESSSGSSSDKTIKLFGFELISGSRTPEITTAESVSSSTNTTSLTVMKRHECQYCGKEFANSQALGGHQNAHKKERLKKKRLQLQARRASIGYYLTNHQQPITTSFQRQYKTPSYCAFSSMHVNNDQMGVYNEDWSSRSSQINFGNNDTCQDLNEQSGEMGKLYGVRPNMIQFQRDLSSRSDQMRSINSLDLHLGFAGDAA

SEQ ID NO: 222 - DNA, 728 bp, Arabidopsis thaliana
aagcttgatatcgcctctctctaatctctctttctctctctatctctaagaatatataaaggtatggactaccagccaaacacatccctacgtctaagcctaccaagttacaagaaccaccaactaaacctagaacttgttctcgagccttcttccatgtcttcttcttcatcttcttccacgaactcatcatcatgtttggagcagcctagggtattctcatgtaactattgtcaaagaaagttttacagctctcaagctcttggtggtcatcaaaacgctcataagcttgagagaaccttagccaagaagagtcgagaactctttagatcctcaaacactgttgattctgatcagccttacccgttctccggtcgctttgagctttacggccgtggctaccaaggatttctcgaaagtggcggctcgagggacttctccgcccgccgtgtgccggagagtggtcttgatcaggatcaggagaagagtcaccttgacttatccttaaggctctaaaagaatcttatattttgttagtctatatattatcatatcaattgttaatcttaaaattgattgttttacttattagtcatttcctattatctgaaagttttctttgtaagttgtaactatggtcctaaattcaaatccaaatttgattttggaagatggtacctaatgcagtagttaaataagttaaaaaaatgaaggatctataattctct

SEQ ID NO: 223 - protein, 150 aa, Arabidopsis thaliana
MDYQPNTSLRLSLPSYKNHQLNLELVLEPSSMSSSSSSSTNSSSCLEQPRVFSCNYCQRKFYSSQALGGHQNAHKLERTLAKKSRELFRSSNTVDSDQPYPFSGRFELYGRGYQGFLESGGSRDFSARRVPESGLDQDQEKSHLDLSLRL

SEQ ID NO: 224 - DNA, 925 bp, Arabidopsis thaliana
caattcttttactttcattctctttatatattctctctacgctataatatatattacacagaatatacatggaaccgtccatcaaaggagatcaagaaatgttaaaaatcaagaaacaaggtcatcaagatcttgagttggggttgacccttttgtcacgtggaaccgcgacctcatcagagctcaatctcatcgattctttcaaaaccagctcatcatcgacttctcatcatcagcaccagcaagaacaattggcagatccgagagtgttctcgtgtaattattgtcaaagaaagttctatagttcacaagcgctaggcggtcaccaaaacgctcataaacgtgagcgcaccttagccaaacgtggacagtattacaagatgactctctcctccttgccttcttcagcgtttgcgtttggccacggttcagtcagcagattcgcaagcatggcatcgttaccattacatggctcggtgaataacaggtcaacgttagggattcaagctcattcaacgatccataagcccagcttcttaggaagacaaacgacgagtttaagtcatgttttcaaacagagcattcaccagaaaccgaccataggaaagatgttgccggagaaatttcaccttgaagtcgccggaaataataacagtaacatggttgctgctaagttggagagaattggacatttcaagagcaaccaagaagatcataatcagtttaagaaaattgacttgactcttaagctatgagctctgccatcttctttttagtcttcattataactttttttattctcatctttgtttgatataatgattgacggcagggtgtgttagagtttcactaatgatcaagttgtactttttatatatttcattgataccttgttgatgtaattcaatattttaggtctgttttt

SEQ ID NO: 225 - protein, 228 aa, Arabidopsis thaliana
MEPSIKGDQEMLKIKKQGHQDLELGLTLLSRGTATSSELNLIDSFKTSSSSTSHHQHQQEQLADPRVFSCNYCQRKFYSSQALGGHQNAHKRERTLAKRGQYYKMTLSSLPSSAFAFGHGSVSRFASMASLPLHGSVNNRSTLGIQAHSTIHKPSFLGRQTTSLSHVFKQSIHQKPTIGKMLPEKFHLEVAGNNNSNMVAAKLERIGHFKSNQEDHNQFKKIDLTLKL

SEQ ID NO: 226 - DNA, 577 bp, Arabidopsis thaliana
tcctctgtagcttaagaacctctcaaaaatggcggaaccaccaccgtcttaccttcatttcgtaggtcctgcaaaaactcgatcatcaagcaaacgccactctttctcctcctctgcacatccagcttcccaccgtctctttccatgtcagtactgtcctcgaaagttctacacatctcaagctctcggcggtcaccaaaacgctcacaaacgcgaacgcgccgctgctcgtcgtaacctcggcgtcctcgctaactctccacccatcctcgacgacaacaacacgtttcttcgtccttacccttgcttttaccaaaacccatttcaaggatctacttctggaaacgaaccgcttcaggaacagccgacgatgatgacgatggatggctacgatccgtttcatccgtatccgtatgtgtacccttttgcattatccggtaacaacaacgacggaggaaacggcgttatggaagaagacgagcctctcgatctagacctttctctccgtttataagttatctctgctttcttctctgttttgttttttgttcagatgactcttttaagtacaactttg

SEQ ID NO: 227 - protein, 161 aa, Arabidopsis thaliana
MAEPPPSYLHFVGPAKTRSSSKRHSFSSSAHPASHRLFPCQYCPRKFYTSQALGGHQNAHKRERAAARRNLGVLANSPPILDDNNTFLRPYPCFYQNPFQGSTSGNEPLQEQPTMMTMDGYDPFHPYPYVYPFALSGNNNDGGNGVMEEDEPLDLDLSLRL

SEQ ID NO: 228 - DNA, 708 bp, Arabidopsis thaliana
atggacgcttcaatagtttcctcatccactgcttttccatatcaagattctctaaaccagagcatcgaagacgaagaaagagacgttcataattctagtcacgaactcaatctcatcgactgcatagacgacacaacgagtatcgttaacgaatctacaacatccacagaacaaaagcttttctcatgcaactattgtcaaagaactttctatagctcacaagcacttggtggtcaccaaaacgcacacaagagagagagaacgttggcgaagagaggacaacgtatggcagcgtcagcctcagcttttggacatccttacggtttctctccacttcctttccacggacagtacaacaaccataggtctttagggatccaagcgcattcgataagccacaagctaagttcttataacgggtttggtggtcactatggtcagatcaactggtcaagacttccatttgatcaacaaccagccataggtaaatttccctcaatggataattttcatcatcatcatcatcagatgatgatgatggctccttcagtaaattcacggtccaataacatcgatagcccaagcaacacaggacgggttctagaagggtcaccgactcttgaacaatggcacggagacaaaggattgttgttaagtacaagtcatcatgaagagcagcagaaacttgacttgtccctcaagctttga

SEQ ID NO: 229 - protein, 235 aa, Arabidopsis thaliana
MDASIVSSSTAFPYQDSLNQSIEDEERDVHNSSHELNLIDCIDDTTSIVNESTTSTEQKLFSCNYCQRTFYSSQALGGHQNAHKRERTLAKRGQRMAASASAFGHPYGFSPLPFHGQYNNHRSLGIQAHSISHKLSSYNGFGGHYGQINWSRLPFDQQPAIGKFPSMDNFHHHHHQMMMMAPSVNSRSNNIDSPSNTGRVLEGSPTLEQWHGDKGLLLSTSHHEEQQKLDLSLKL

SEQ ID NO: 230 - DNA, 1032 bp, Arabidopsis thaliana
gttgcgtttccacatttgtttaaacataactctctctctctctctctctctctctctctctcagtacctcttattcttatgctcttcttcaccaatcctatctcttctatctgtctttattttctctacatgtgaattgacccatttctggtaaacacatagagtaccacttttcttatttagattcttcttcctcttcatagcttccaagtcaactacttcagcttctgtcggctgtctcttcccagatctcgttaagaccaaaacttggaataaatgacggaatctgatgatgcctcacgagaaacaccagccagcagaggaggagaagcctcgtcaaatcaagatctgtccaaaccagaatcaaaccatgtttcactcgatctcaagctcaacgatactttcaacgatgacacaaagagcacaaagtgtgaagcaaacccaagagtcttctcttgcaactactgcagacgcaagttctatagctctcaagctcttggaggtcaccagaacgcacacaagcgagaaagaacaatggccaaacgagcaatgcacatgggaagaatgtttggtcaccatcacaggccttacacatacacttcttcttcccttgggatgcaagctcactccggtttacttcatcacaccttatctcagcctcagcctcttgtttctaggtttcatcatcaagggtattttggtaacaccgtgccgttgttctttgactatgacgatggtggtagcgacttcttctggcccggcagcttccgtcaggtggttgaggaagctgaggctccggtggttgtggtggctagtactgagtcaggccttgatttgaactcggttgcggcaaatggaggtgtagataataatagctcaaagcctgatcttaccttaagactctaaaaggattaaggagattatatctttattgttatttttctattgttagacattcagaagataagttggagacagttgatagaaattgatgaaaaactttgttgttatattaaatgaggttgttcatta

SEQ ID NO: 231 - protein, 209 aa, Arabidopsis thaliana
MTESDDASRETPASRGGEASSNQDLSKPESNHVSLDLKLNDTFNDDTKSTKCEANPRVFSCNYCRRKFYSSQALGGHQNAHKRERTMAKRAMHMGRMFGHHHRPYTYTSSSLGMQAHSGLLHHTLSQPQPLVSRFHHQGYFGNTVPLFFDYDDGGSDFFWPGSFRQVVEEAEAPVVVVASTESGLDLNSVAANGGVDNNSSKPDLTLRL

SEQ ID NO: 232 - DNA, 694 bp, Arabidopsis thaliana
ctctcggtcttcagctcaaggtatagctacattcatacgcatttcattttagggttggctttccaagttgtttgtgcacttattggaagttaatataatccttagtcacttttttgtatgtgtatagataacatagaatggaagatcattaccatcaagtagaagtggagggagaagaagagatcaagccaagcaaagaagccaacaagacagacgaaaacacatcatcattaagaatattcccctgcctcttttgttctagaaagttccatagctcccaagccctaggaggccaccagaacgcccacaagaaggagcgaaccgctgctagaagagccaaaagggcttatgattttgtcaacaacaatgacttccttcacacgttacctgttttcttatcctctccctctcaacatcacttgaccatcttaggctaccctgcttctgcctccgttgcctgttttccgacggttcatcccgaccatccgattttcaaatccagtggttctcatgtcgtgttggctacatcccaccaaggtagagattgcaaaggagggtactgttgtcaacaacgtgtagacattttggatcatcattataacgtggtcaatagtgacaagggtaaagatcagtgtcttgatctctccctacatttgtgattttagcattatcatttgttagttatggtcttgcc

SEQ ID NO: 233 - protein, 173 aa, Arabidopsis thaliana
MEDHYHQVEVEGEEEIKPSKEANKTDENTSSLRIFPCLFCSRKFHSSQALGGHQNAHKKERTAARRAKRAYDFVNNNDFLHTLPVFLSSPSQHHLTILGYPASASVACFPTVHPDHPIFKSSGSHVVLATSHQGRDCKGGYCCQQRVDILDHHYNVVNSDKGKDQCLDLSLHL

SEQ ID NO: 234 - DNA, 774 bp, Arabidopsis thaliana
atggacgaaaccaacggacgaagagaaactcacgatttcatgaacgtcaacgttgaatccttctctcagcttcctttcatccgccgtactcctcccaaagaaaaagccgccattattcgtctcttcggccaagagctcgtcggtgataactccgacaacttatccgcagaaccttctgatcatcaaaccactaccaagaacgatgagagctctgagaatatcaaggacaaagacaaagaaaaagataaggacaaagacaaagataacaacaacaacaggagattcgagtgtcactactgcttcagaaacttcccaacttctcaagccctaggtggacatcaaaacgctcacaaacgtgaacgtcaacacgccaaacgcggttccatgacatcataccttcatcatcatcagcctcatgaccctcaccacatctacggcttcctcaacaaccaccaccaccgtcactatccgtcttggacgacggaagctagatcatactacggcggagggggacatcaaacgccgtcgtactactcaaggaatactcttgctcctccttcttctaacccaccgacaatcaacggaagtcctttaggtttgtggcgtgtaccgccttccacgtcaacaaatactattcaaggcgtttactcatcttcaccagcttcagcgtttaggtcgcatgagcaagagactaataaggagcctaataactggccgtacagattgatgaaacccaatgtgcaagatcatgtgagtctcgatcttcatctctga

SEQ ID NO: 235 - protein, 257 aa, Arabidopsis thaliana
MDETNGRRETHDFMNVNVESFSQLPFIRRTPPKEKAAIIRLFGQELVGDNSDNLSAEPSDHQTTTKNDESSENIKDKDKEKDKDKDKDNNNNRRFECHYCFRNFPTSQALGGHQNAHKRERQHAKRGSMTSYLHHHQPHDPHHIYGFLNNHHHRHYPSWTTEARSYYGGGGHQTPSYYSRNTLAPPSSNPPTINGSPLGLWRVPPSTSTNTIQGVYSSSPASAFRSHEQETNKEPNNWPYRLMKPNVQDHVSLDLHL

SEQ ID NO: 236 - DNA, 1854 bp, Arabidopsis thaliana
atggcgattgaaactcagcttccttgcgacggtgacggtgtgtgtatgcggtgtcaggtgaatcctccgtcagaagagactctcacttgtggcacgtgcgtcactccatggcacgtgccgtgtctcctccccgaatcactcgcttcttccactggagagtgggagtgtcccgattgctccggcgttgtcgttccctccgccgctccgggtaccggaaacgctcgacctgaatcttccggttcagttctcgttgctgcgatccgtgcgattcaggctgatgagactttaaccgaagctgagaaagccaaaaaaaggcagaaactgatgagtgggggtggtgacgatggtgtcgatgaagaagagaagaagaagttagaaatcttttgttctatttgcattcaattgccagaaagacctatcacgacaccgtgtgggcacaatttctgtttgaaatgtttcgagaaatgggcagtaggtcaagggaagctaacttgtatgatatgccgaagcaaaattccgagacatgtggcaaaaaatcctcgcatcaacttagctctagtttctgctattcgtttagcaaatgttaccaaatgttctgttgaggcaactgcagccaaggttcatcatattatccgcaaccaagaccgtcctgagaaagcatttactaccgagcgggcagtaaaaactgggaaagctaatgctgctagcggtaagttttttgtgacaatacctcgtgatcattttggtcccataccagctgagaatgatgtcactagaaagcaaggtgttttggttggagaatcttgggaggacaggcaagagtgtaggcagtggggagctcatttcccgcatattgctggcattgccgggcaatcagcggttggagctcagtctgtggccctctctggaggttatgacgatgatgaggatcatggtgaatggtttctctacacaggaagtggtggaagggatctcagtggaaacaaaagaattaacaagaaacagtcgtctgaccaggcgtttaaaaacatgaatgaatctctaagacttagttgcaaaatgggctatcctgtccgagttgtcaggtcttggaaggagaagcgttctgcatatgcccctgctgaaggtgtgagatatgatggggtctatcgaattgagaagtgctggagtaatgttggagtacagggttcttttaaggtctgtcgttacctgtttgttagatgtgacaatgagccagctccatggaccagtgatgagcatggcgatcgtccaagaccgttgcctaatgttccggagcttgagactgctgctgacctgtttgtgagaaaggagagtccatcatgggatttcgatgaagctgagggtcgttggaaatggatgaagtctcctcctgttagcagaatggctttggatcctgaggagaggaagaagaataagagagcaaaaaatactatgaaggccagacttctgaaagaatttagttgccaaatctgtcgggaagtgctgagtcttccagtgacgacgccttgtgcacacaacttctgcaaagcatgcttagaagcgaagtttgctgggataactcaactgagagagagaagcaatggcggacgtaaactacgtgcaaagaagaacatcatgacctgcccttgctgcacgacggatctctccgagtttctccaaaacccgcaggtgaacagagagatgatggagataatagagaattttaagaagagtgaggaagaggctgatgcatccatttctgaagaagaagaagaagaatccgaacctccaactaagaagattaagatggataacaactctgttggtggtagtggtacaagtctctcagcttaa

SEQ ID NO: 237 - protein, 617 aa, Arabidopsis thaliana
MAIETQLPCDGDGVCMRCQVNPPSEETLTCGTCVTPWHVPCLLPESLASSTGEWECPDCSGVVVPSAAPGTGNARPESSGSVLVAAIRAIQADETLTEAEKAKKRQKLMSGGGDDGVDEEEKKKLEIFCSICIQLPERPITTPCGHNFCLKCFEKWAVGQGKLTCMICRSKIPRHVAKNPRINLALVSAIRLANVTKCSVEATAAKVHHIIRNQDRPEKAFTTERAVKTGKANAASGKFFVTIPRDHFGPIPAENDVTRKQGVLVGESWEDRQECRQWGAHFPHIAGIAGQSAVGAQSVALSGGYDDDEDHGEWFLYTGSGGRDLSGNKRINKKQSSDQAFKNMNESLRLSCKMGYPVRVVRSWKEKRSAYAPAEGVRYDGVYRIEKCWSNVGVQGSFKVCRYLFVRCDNEPAPWTSDEHGDRPRPLPNVPELETAADLFVRKESPSWDFDEAEGRWKWMKSPPVSRMALDPEERKKNKRAKNTMKARLLKEFSCQICREVLSLPVTTPCAHNFCKACLEAKFAGITQLRERSNGGRKLRAKKNIMTCPCCTTDLSEFLQNPQVNREMMEIIENFKKSEEEADASISEEEEEESEPPTKKIKMDNNSVGGSGTSLSA

SEQ ID NO: 238 - DNA, 636 bp, Arabidopsis thaliana
atgggtttctcaatgttcttctcccccgaaaacgacgtcagccatcattcctctccatatgcttctgttgactgcactctctcacttggaactccctccactcgcctctgcaacgaggatgatgaacgtagattctcgtctcatacctccgacaccataggctgggacttcttgaacggttccaagaaaggcggtggaggcggcggacataacctcctcgctcgccgttgcgccaactgcgacaccacttctactcctctttggagaaacggtccaagaggtcccaagtcgttgtgtaatgcgtgtggaatccgattcaagaaagaagagagacgtgcatcgaccgccagaaactcgacctccggcggaggatcaactgcagctggagttccaactttggatcatcaagcaagtgcaaattattattataacaataataaccaatatgcttcatcgtcgccttggcaccatcagcataatacgcagagagttccatattactcgccggccaataacgaatactcatacgttgatgatgtcagagttgttgatcatgacgtcacaaccgacccgttcttgtcttggaggcttaacgtcgccgaccggaccggccttgtccacgattttacgatgtga

SEQ ID NO: 239 - protein, 211 aa, Arabidopsis thaliana
MGFSMFFSPENDVSHHSSPYASVDCTLSLGTPSTRLCNEDDERRFSSHTSDTIGWDFLNGSKKGGGGGGHNLLARRCANCDTTSTPLWRNGPRGPKSLCNACGIRFKKEERRASTARNSTSGGGSTAAGVPTLDHQASANYYYNNNNQYASSSPWHHQHNTQRVPYYSPANNEYSYVDDVRVVDHDVTTDPFLSWRLNVADRTGLVHDFTM

SEQ ID NO: 240 - DNA, 2940 bp, Arabidopsis thaliana
gttttttcttctgaagagtgatatatattctacctttctctggttaaagaaactccctgaatccaccggttatgtcttgaccggctttaagcctataaactgatgccctaagacacctttttaggtttctcaataattctccgcatctatcttttcttctccacaagtaagggaaccagaaaaccagggaagaatccgagcaagctagggtttcattgtgtgcacaaaatgggatatacaggcagaagaaaatcgagataaatcaactaaatgatttggataatcatcttgaagatttgaaggatttcgagactaagtccggcgcagaagtcaccatggagaatcctttagaagaagagcttcaagatcctaatcagcgtcccaacaaaaagaagcgttaccaccgtcacacacaacgccagattcaagagctagagtcgttcttcaaggaatgtcctcatccagacgataagcaaagaaaggagctgagtcgcgagctaagcttagaacctcttcaagtcaagttctggttccaaaacaaacgcactcaaatgaaggcacaacatgagaggcacgagaaccagatactgaagtcagaaaatgacaagctccgagcagagaacaataggtacaaggatgctctaagcaacgcaacatgcccaaactgtggtggtccggcagctataggagaaatgtccttcgacgaacagcatttaaggatcgaaaatgctcgtttacgcgaagagattgacagaatctctgccatagctgctaaatacgtagggaagcctttaatggctaattcctcttctttccctcagctctcttcttcacaccacattccctcgcgctcgcttgatcttgaagttgggaactttgggaacaataacaatagccacactggtttcgttggggaaatgtttggaagcagcgacattttgaggtcggtttcgataccttctgaggctgataagcctatgattgttgagttagctgttgcagcaatggaagagcttgtgagaatggctcaaactggtgatcccttatgggtttcaagcgataattctgttgagattctcaatgaagaagagtattttaggacgtttcctagaggaattggaccgaaacctatcggtttgagatcagaagcttcaagagagtctactgttgttatcatgaatcatatcaatctcattgagattctaatggatgtgaatcaatggtctagtgtgttctgcgggattgtatcaagagcattgactctagaagttctctcaactggcgtacgagggaactacaatggggcattgcaagtgatgacagcagagttccaagtcccatcgccgcttgtccctactcgtgagaactactttgtaaggtactgtaaacagcacagtgacggtatttgggcggttgtggatgtctctttggacagcctaagaccaagtccgatcactagaagcagaagaagaccctctggttgtctgattcaagaattgcagaatggttactccaaggtgacatgggtagagcatattgaggtggatgatagatcggttcacaacatgtataaaccgttggttaataccggtttagctttcggtgcaaaacgttgggtggctacacttgaccgccaatgtgagcggctcgccagttccatggccagcaacattccggcttgtgatctttccgtgataacgagtcctgaggggagaaagagcatgctgaaactagcggagagaatggtgatgagcttctgtaccggagtcggcgcgtcaaccgccgatgcctggactacattgtcgaccacaggatccgacgacgttcgggtcatgacccgaaagagcatggatgatccgggaagacctccaggcatcgttctcagcgccgctacttctttctggatccctgtagctccaaaacgagtgttcgattttctcagagatgaaaactcaagaagcgagtgggatatactttccaatggaggcttggttcaagaaatggctcatatcgcaaatggtcgtgatcctgggaatagtgtctccttgcttcgagtcaatagtgggaactcagggcagagcaacatgttgatcttacaagaaagttgtacggacgcatcagggtcctatgtgatatacgcaccagttgatataatagctatgaacgttgtcctgagtggtggtgatccggattatgtcgctttgttaccatccggattcgctattttgccggatggctctgctagaggaggaggaggtagtgctaatgccagtgctggagccggagttgaaggaggaggagaggggaataatcttgaagtggttactactactgggagttgtggcggttcactactcacagttgcgtttcagatacttgttgactctgttcctaccgctaaactctctctcggttcagttgctacagtcaatagtctgatcaaatgcactgtcgagcggattaaagccgctctggcctgcgacggagcctaatcgatgttttcggaaggtaagagtgaaaggggaggtttagggagtttatgataatgtttgtgttcttttggtttttaaagtcttttgagattctccaaaggaagtcaagaacgctcctttttgcgtttaatctcatttccgcgtttgttagcggacgggccaaagaaagaggcttgagaaagaaaaggtaaagaggttcgggtattgacttctgctggaaccaaaaaaaaaggaatcgggtttgttgtgtttcggcggtttagcattttgcgttttctttgttattatttatcattgactagtgaacagtttagcgttctgcttttcgcgtctactgtgaaactccttgttattaagccactctagtggtactgtcattatatattatgaatctatgaaactgtgtttattagtttgtttctttaatccaaacttgagattctcttct

SEQ ID NO: 241 - protein, 718 aa, Arabidopsis thaliana
MENPLEEELQDPNQRPNKKKRYHRHTQRQIQELESFFKECPHPDDKQRKELSRELSLEPLQVKFWFQNKRTQMKAQHERHENQILKSENDKLRAENNRYKDALSNATCPNCGGPAAIGEMSFDEQHLRIENARLREEIDRISAIAAKYVGKPLMANSSSFPQLSSSHHIPSRSLDLEVGNFGNNNNSHTGFVGEMFGSSDILRSVSIPSEADKPMIVELAVAAMEELVRMAQTGDPLWVSSDNSVEILNEEEYFRTFPRGIGPKPIGLRSEASRESTVVIMNHINLIEILMDVNQWSSVFCGIVSRALTLEVLSTGVRGNYNGALQVMTAEFQVPSPLVPTRENYFVRYCKQHSDGIWAVVDVSLDSLRPSPITRSRRRPSGCLIQELQNGYSKVTWVEHIEVDDRSVHNMYKPLVNTGLAFGAKRWVATLDRQCERLASSMASNIPACDLSVITSPEGRKSMLKLAERMVMSFCTGVGASTADAWTTLSTTGSDDVRVMTRKSMDDPGRPPGIVLSAATSFWIPVAPKRVFDFLRDENSRSEWDILSNGGLVQEMAHIANGRDPGNSVSLLRVNSGNSGQSNMLILQESCTDASGSYVIYAPVDIIAMNVVLSGGDPDYVALLPSGFAILPDGSARGGGGSANASAGAGVEGGGEGNNLEVVTTTGSCGGSLLTVAFQILVDSVPTAKLSLGSVATVNSLIKCTVERIKAALACDGA

SEQ ID NO: 242 - DNA, 2217 bp, Arabidopsis thaliana
tagggtttgctttcagtttccggagtataagaaaagatgttcgagccaaatatgctgcttgcggctatgaacaacgcagacagcaataaccacaactacaaccacgaagacaacaataatgaaggatttcttcgggacgatgaattcgacagtccgaatactaaatcgggaagtgagaatcaagaaggaggatcaggaaacgaccaagatcctcttcatcctaacaagaagaaacgatatcatcgacacacccaacttcagatccaggagatggaagcgttcttcaaagagtgtcctcacccagatgacaagcaaaggaaacagctaagccgtgaattgaatttggaacctcttcaggtcaaattctggttccaaaacaaacgtacccaaatgaagaatcatcacgagcggcatgagaactcacatcttcgggcggagaacgaaaagcttcgaaacgacaacctaagatatcgagaggctcttgcaaatgcttcgtgtcctaattgtggtggtccaacagctatcggagaaatgtcattcgacgaacaccaactccgtctcgaaaatgctcgattaagggaagagatcgaccgtatatccgcaatcgcagctaaatacgtaggcaagccagtctcaaactatccacttatgtctcctcctcctcttcctccacgtccactagaactcgccatgggaaatattggaggagaagcttatggaaacaatccaaacgatctccttaagtccatcactgcaccaacagaatctgacaaacctgtcatcatcgacttatccgtggctgcaatggaagagctcatgaggatggttcaagtagacgagcctctgtggaagagtttggctttagacgaagaagaatatgcaaggacctttcctagagggatcggacctagaccggctggatatagatcagaagcttcgcgagaaagcgcggttgtgatcatgaatcatgttaacatcgttgagattctcatggatgtgaatcaatggtcgacgattttcgcggggatggtttctagagcaatgacattagcggttttatcgacaggagttgcaggaaactataatggagctcttcaagtgatgagcgcagagtttcaagttccatctccattagtcccaacacgtgaaacctatttcgcacgttactgtaaacaacaaggagatggttcgtgggcggttgtcgatatttcgttggatagtctccaaccaaatcccccggctagatgcaggcggcgagcttcaggatgtttgattcaagaattgccaaatggatattctaaggtgacttgggtggagcatgtggaagttgatgacagaggagttcataacttatacaaacacatggttagtactggtcatgccttcggtgctaaacgctgggtagccattcttgaccgccaatgcgagcggttagctagtgtcatggctacaaacatttcctctggagaagttggcgtgataaccaaccaagaagggaggaggagtatgctgaaattggcagagcggatggttataagcttttgtgcaggagtgagtgcttcaaccgctcacacgtggactacattgtccggtacaggagctgaagatgttagagtgatgactaggaagagtgtggatgatccaggaaggtctcctggtattgttcttagtgcagccacttctttttggatccctgttcctccaaagcgagtctttgacttcctcagagacgagaattcaagaaatgagtgggatattctgtctaatggaggagttgtgcaagaaatggcacatattgctaacgggagggataccggaaactgtgtttctcttcttcgggtaaatagtgcaaactctagccagagcaatatgctgatcctacaagagagctgcattgatcctacagcttcctttgtgatctatgctccagtcgatattgtagctatgaacatagtgcttaatggaggtgatccagactatgtggctctgcttccatcaggttttgctattcttcctgatggtaatgccaatagtggagcccctggaggagatggagggtcgctcttgactgttgcttttcagattctggttgactcagttcctacggctaagctgtctcttggctctgttgcaactgtcaataatctaatagcttgcactgttgagagaatcaaagcttcaatgtcttgtgagactgcttgaaaaccatccattagc

SEQ ID NO: 243 - protein, 721 aa, Arabidopsis thaliana
MFEPNMLLAAMNNADSNNHNYNHEDNNNEGFLRDDEFDSPNTKSGSENQEGGSGNDQDPLHPNKKKRYHRHTQLQIQEMEAFFKECPHPDDKQRKQLSRELNLEPLQVKFWFQNKRTQMKNHHERHENSHLRAENEKLRNDNLRYREALANASCPNCGGPTAIGEMSFDEHQLRLENARLREEIDRISAIAAKYVGKPVSNYPLMSPPPLPPRPLELAMGNIGGEAYGNNPNDLLKSITAPTESDKPVIIDLSVAAMEELMRMVQVDEPLWKSLALDEEEYARTFPRGIGPRPAGYRSEASRESAVVIMNHVNIVEILMDVNQWSTIFAGMVSRAMTLAVLSTGVAGNYNGALQVMSAEFQVPSPLVPTRETYFARYCKQQGDGSWAVVDISLDSLQPNPPARCRRRASGCLIQELPNGYSKVTWVEHVEVDDRGVHNLYKHMVSTGHAFGAKRWVAILDRQCERLASVMATNISSGEVGVITNQEGRRSMLKLAERMVISFCAGVSASTAHTWTTLSGTGAEDVRVMTRKSVDDPGRSPGIVLSAATSFWIPVPPKRVFDFLRDENSRNEWDILSNGGVVQEMAHIANGRDTGNCVSLLRVNSANSSQSNMLILQESCIDPTASFVIYAPVDIVAMNIVLNGGDPDYVALLPSGFAILPDGNANSGAPGGDGGSLLTVAFQILVDSVPTAKLSLGSVATVNNLIACTVERIKASMSCETA

SEQ ID NO: 244 - DNA, 957 bp, Arabidopsis thaliana
atgggggaaagagatgatgggttgggtttgagtctaagcttgggaaatagtcaacaaaaagaaccatctctgaggttgaatcttatgccgttgacaacttcttcttcttcttcttcgtttcaacacatgcacaatcagaataacaatagccatccccagaagattcataacatctcttggactcatctgtttcaatcttctgggattaaacgtacaactgcagagagaaactccgacgccgggtcatttctaagaggtttcaacgtgaacagagctcagtcttcggtggcggtagtggacttggaagaagaagccgccgtcgtctcgtctccaaacagcgccgtttcgagtctgagtggaaataaaagggatcttgcggtggcgagaggaggagatgaaaacgaggcggagagagcttcttgctcacgcggagggggaagcggtggtagcgacgatgaagacggcggaaacggcgacggatcaaggaagaaactacggttatcgaaggatcaagctcttgttctcgaggagacttttaaagaacatagcactcttaatccgaagcaaaagctggctctagcaaaacagttgaatctaagggcaagacaagttgaagtgtggtttcagaaccgtagggcaaggacgaagctgaaacaaacggaggttgattgtgagtatttaaagagatgttgcgataatctgaccgaggagaatcgacggctgcagaaagaagtgtcggagctgagggcgttgaagttgtctccacatctctacatgcacatgactcctcctactactctcaccatgtgcccttcttgcgaacgtgtctcctcctctgccgccactgtgaccgctgctccttccactactactactcctacggtggtggggcggccaagtccacagcgattaactccttggactgctatttctctccagcaaaaatcaggtcgctag

SEQ ID NO: 245 - protein, 318 aa, Arabidopsis thaliana
MGERDDGLGLSLSLGNSQQKEPSLRLNLMPLTTSSSSSSFQHMHNQNNNSHPQKIHNISWTHLFQSSGIKRTTAERNSDAGSFLRGFNVNRAQSSVAVVDLEEEAAVVSSPNSAVSSLSGNKRDLAVARGGDENEAERASCSRGGGSGGSDDEDGGNGDGSRKKLRLSKDQALVLEETFKEHSTLNPKQKLALAKQLNLRARQVEVWFQNRRARTKLKQTEVDCEYLKRCCDNLTEENRRLQKEVSELRALKLSPHLYMHMTPPTTLTMCPSCERVSSSAATVTAAPSTTTTPTVVGRPSPQRLTPWTAISLQQKSGR

SEQ ID NO: 246 - DNA, 882 bp, Arabidopsis thaliana
atggcctttcctcaacatggcttcatgtttcagcaactccatgaagacaatgctcatcacttaccttccccaacctctctcccctcttgtcctcctcatctcttctatggaggaggaggaaactacatgatgaacagatcaatgtcgttcacgggagtatcagatcattatcatctaactcaaaaaagcccgacaacaacgaacaacatgaatgatcaagaccaggtaggcgaggaagacaacctatcagacgatgggtcacatatgatgttaggagagaagaagaagaggctgaatttagagcaagttagggcattagagaagagcttcgagctagggaacaagctggagccagagaggaagatgcagcttgctaaggctttaggattgcagcctaggcagattgcaatatggtttcagaacaggagagctaggtggaagacaaagcagctcgagagagactatgattctctcaaaaaacagttcgatgttttgaaatcggacaatgattctcttcttgcccacaacaagaaactacatgctgagttagtggcattgaagaaacacgaccgtaaagaatcagcaaagatcaagagagaattcgcagaagcttcatggagcaacaatgggagcacagaaaataatcataacaataatagttcagacgctaatcatgtgagcatgatcaaagatcttttcccttcttcgatccgatccgcgaccgcgaccacggcctctacccatattgatcatgagattgttcaagatcaagatcaagggttttgcaatatgttcaatggtattgatgaaacgacgtcggctagttattgggcatggcctgaccagcagcaacaacatcacaatcatcatcagttcaattga

SEQ ID NO: 247 - protein, 293 aa, Arabidopsis thaliana
MAFPQHGFMFQQLHEDNAHHLPSPTSLPSCPPHLFYGGGGNYMMNRSMSFTGVSDHYHLTQKSPTTTNNMNDQDQVGEEDNLSDDGSHMMLGEKKKRLNLEQVRALEKSFELGNKLEPERKMQLAKALGLQPRQIAIWFQNRRARWKTKQLERDYDSLKKQFDVLKSDNDSLLAHNKKLHAELVALKKHDRKESAKIKREFAEASWSNNGSTENNHNNNSSDANHVSMIKDLFPSSIRSATATTASTHIDHEIVQDQDQGFCNMFNGIDETTSASYWAWPDQQQQHHNHHQFN

SEQ ID NO: 248 - DNA, 1149 bp, Arabidopsis thaliana
atggagagtggttccaacagcacttcttgtccaatggcttttgccggggataatagtgatggtccgatgtgtcctatgatgatgatgatgccgcccatcatgacatcacatcaacatcatggtcatgatcatcaacatcaacaacaagaacatgatggttatgcatatcagtcacaccaccaacaaagtagttccctttttcttcaatcactagctcctccccaaggaactaagaacaaagttgcttcttcttcttctccttcctcttgtgctcctgcctattctctaatggagatccatcataacgaaatcgttgcaggaggaatcaacccttgctcctctttctcttcttcagcctctgtcaaggccaagatcatggctcatcctcactaccaccgcctcttggccgcttatgtcaattgtcagaaggttggagcaccaccggaggttgtggcgaggctggaggaggcatgctcgtctgccgcagccgcagccgcatctatggggccaacagggtgtcttggtgaagatccagggcttgatcaattcatggaagcttactgtgaaatgctcgttaagtatgagcaagagctctccaaacctttcaaggaagctatggtcttccttcaacgtgtcgagtgtcaattcaaatccctctctctatcctcaccttcctctttctccggttatggagagacagcaattgataggaacaataatgggtcatccgaggaagaagtcgatatgaacaatgaatttgtagatccacaagctgaggatagagagcttaaaggacagctcttgcgcaagtacagtggttacttagggagcctcaagcaagagttcatgaagaagaggaagaaaggaaagctccctaaagaagctcgtcaacaactgcttgattggtggagccgtcactacaaatggccttacccttcggagcaacaaaagctcgcccttgcggaatcaacggggctggaccagaaacagataaacaattggttcataaaccagaggaaacggcattggaagccgtcggaggacatgcagtttgtagtaatggacgcaacacatcctcaccattacttcatggataatgtcttggacaatcctttcccaatggatcacatctcctccaccatgctttga

SEQ ID NO: 249 - protein, 382 aa, Arabidopsis thaliana
MESGSNSTSCPMAFAGDNSDGPMCPMMMMMPPIMTSHQHHGHDHQHQQQEHDGYAYQSHHQQSSSLFLQSLAPPQGTKNKVASSSSPSSCAPAYSLMEIHHNEIVAGGINPCSSFSSSASVKAKIMAHPHYHRLLAAYVNCQKVGAPPEVVARLEEACSSAAAAAASMGPTGCLGEDPGLDQFMEAYCEMLVKYEQELSKPFKEAMVFLQRVECQFKSLSLSSPSSFSGYGETAIDRNNNGSSEEEVDMNNEFVDPQAEDRELKGQLLRKYSGYLGSLKQEFMKKRKKGKLPKEARQQLLDWWSRHYKWPYPSEQQKLALAESTGLDQKQINNWFINQRKRHWKPSEDMQFVVMDATHPHHYFMDNVLDNPFPMDHISSTML

SEQ ID NO: 250 - DNA, 1177 bp, Arabidopsis thaliana
tataaatcttcgtttctacttttttttcttccataatatagtcaattcgttttcttaattagggcttcttctctttgtttctccaatctttattagtttatttatttattttggttattgtatacaaatggcaatggctttaaacatgaatgcttacgtagacgagttcatggaagctcttgaaccattcatgaaggtaacttcatcttcttctacttcgaattcatcaaatccaaaaccattaactcctaatttcatccctaataatgaccaagtcttaccggtatctaaccaaaccggtccgattgggctaaaccagctcactccaacacaaatcctccaaattcagacagagttacatctccggcaaaaccaatctcgtcgtcgcgctggtagtcatcttctcaccgctaaaccaacctcaatgaagaaaatcgacgtagcaactaaaccggttaaactataccgaggcgtaagacagaggcaatggggtaaatgggtagctgagattcggctacctaaaaaccgaacccggttatggctcggtacgttcgaaacggctcaagaagctgcattagcttacgatcaagcagctcataagatcagaggagacaacgctcgtctcaatttcccagacattgttcgtcaaggacactataaacagatattgtctccgtctatcaacgcaaagatcgaatccatctgcaatagttctgatcttccactgcctcagatcgagaaacagaacaaaacagaggaggtgctctctggtttttccaaaccggagaaagaaccggaatttggggagatatacggatgcggatactcgggctcatctcctgagtcggatataacgttgttggatttctcaagcgactgtgtgaaagaagatgagagtttcttgatgggtttgcacaagtatccttctttggagattgattgggacgctatagagaaactcttctgaatccattttatctttttgattcatttgtctctaaattgtagaattttattttcagagctttgtaagggaagttcttgaatgagagttgcagaggactagtggaacctaactctgttttcttttgtaagtattgtttataatgggccgttgaatgggccttattgatttaaacagcccaagtttttaaaaaaaaaaaaaaaaaaaaaaaaa

SEQ ID NO: 251 - protein, 279 aa, Arabidopsis thaliana
MAMALNMNAYVDEFMEALEPFMKVTSSSSTSNSSNPKPLTPNFIPNNDQVLPVSNQTGPIGLNQLTPTQILQIQTELHLRQNQSRRRAGSHLLTAKPTSMKKIDVATKPVKLYRGVRQRQWGKWVAEIRLPKNRTRLWLGTFETAQEAALAYDQAAHKIRGDNARLNFPDIVRQGHYKQILSPSINAKIESICNSSDLPLPQIEKQNKTEEVLSGFSKPEKEPEFGEIYGCGYSGSSPESDITLLDFSSDCVKEDESFLMGLHKYPSLEIDWDAIEKLF

SEQ ID NO: 252 - DNA, 1507 bp, Arabidopsis thaliana
aaaaaatcactgtttcataacacgtttttctctctcacccaccaaaaaaaaatcttttgttcttgttaccaaaaaatctcgtgataaatctcttcaaactttgttttattttcttcttgattctctcgaaatctctctcaacaaacccagaaactttccttgattcgcaagcttttcttccttttatattcttcattttgatgcgaatatagagagagtccataaaagaaacagtaatggacgaatatattgatttccgaccattgaagtacacagagcacaagacttcaatgactaaatacaccaaaaagtcatcggaaaaactttccggtggtaagtcattgaaaaaggttagtatttgttatactgatcctgacgcaacagattcatcaagtgacgaagacgaagaagatttcttgtttcctcgccggagagtcaaaagattcgttaacgagatcactgttgagcctagctgtaacaacgtcgtcaccggagtttcgatgaaagatagaaagagactctcttcttcctccgatgaaactcaatctccggcgtcgagtcgtcaacgtcctaataacaaagtttcagtctccggtcagataaagaagttccgtggtgttagacaacggccatgggggaaatgggcggcggagattagagatccggagcaacgtcggaggatttggctcgggacttttgagacggcggaggaagctgccgtggtttatgataacgccgctataagactccgtggaccggacgctttaactaatttctccataccgcctcaagaagaggaagaagaagaagaaccggaaccggttattgaggagaaaccggttattatgacgacgccaacaccaacaacatcgagttctgaatcaactgaagaagatttacaacatctctcatctcctacttcggttctcaatcaccggtcagaagagattcaacaagtacaacaaccgtttaaatcagctaaacccgaaccgggggtttcaaatgcaccatggtggcataccgggtttaataccggtttaggtgaatcagacgattcatttcctttggatactccgtttcttgacaactatttcaatgaatcaccaccagagatgtcaatatttgaccaaccaatggatcaaattttctgtgaaaatgatgatatcttcaatgatatgttgttcttgggtggtgaaactatgaacattgaagatgagttaacaagttctagtatcaaagatatgggttcaacgtttagtgattttgatgattcattgatatcagatctattagttgcttaatatgatgatgagagtgaagaagaaaccatcaagcaaatatctatggtgtgactgaaaaattttggtgttacttttttttctttcataagttcatgagcttttttgtttcttttttttaataatttatttagttttgtcaggagcttgtaaaacagttttggagaaatagtggaaaaatagtttaattaaaaaaaaaaaaaaaaaaa

SEQ ID NO: 253 - protein, 354 aa, Arabidopsis thaliana
MDEYIDFRPLKYTEHKTSMTKYTKKSSEKLSGGKSLKKVSICYTDPDATDSSSDEDEEDFLFPRRRVKRFVNEITVEPSCNNVVTGVSMKDRKRLSSSSDETQSPASSRQRPNNKVSVSGQIKKFRGVRQRPWGKWAAEIRDPEQRRRIWLGTFETAEEAAVVYDNAAIRLRGPDALTNFSIPPQEEEEEEEPEPVIEEKPVIMTTPTPTTSSSESTEEDLQHLSSPTSVLNHRSEEIQQVQQPFKSAKPEPGVSNAPWWHTGFNTGLGESDDSFPLDTPFLDNYFNESPPEMSIFDQPMDQIFCENDDIFNDMLFLGGETMNIEDELTSSSIKDMGSTFSDFDDSLISDLLVA

SEQ ID NO: 254 - DNA, 960 bp, Arabidopsis thaliana
cactcactgagtcaaactcacgtgtcaatgaccgagtcatccattatctccgtcaaacaatcgtctccggtgccggaggaggaggatcatcatcatcaccaacaagactcccaccgaaccaacaccaagaaacgtgtaagatccgacccgggttaccgaggcgtccggatgcgaacgtggggcaaatgggtctccgagatccgagagcctcgcaagaagagccgaatctggctaggcactttctccacaccggaaatggcggcgcgtgcacatgacgcagctgctctcaccattaaaggaacttccgccgtcctcaacttcccggagctcgccacttaccttccccgtccagcttcctcctctccacgcgacgttcaagccgcagccgccgtagcggccgccatggacttctccccctcctcctcctctctcgtagtctccgatccaaccaccgtcatcgccccagctgagacgcagttgtcttcctcgagctattcaacgtgtacgtcatcgtcgttgtcaccgtcaagcgaagaagctgcgtcgacggcggaagaactaagcgagatagtggagttaccgagtctagagacgagttacgatgagtcattgagcgagtttgtgtacgttgactcggcgtatccacctagttcgccttggtatattaataattgttatagcttttattaccacagcgacgaaaatggcatttcgatggctgaacctttcgactcttccaattttggccccctttttccttagttttatttttaaataatctcttcttttaaaaacatttagcctccaaacctctgaagtttatttaattattggattcagaccagagtttaatatacttgattaaacctgatagtaccatataatgtttattgctctcttttttttgatcggatcttctagatattttgtacgaacacgccaattgtgattggacgataa

SEQ ID NO: 255 - protein, 244 aa, Arabidopsis thaliana
MTESSIISVKQSSPVPEEEDHHHHQQDSHRTNTKKRVRSDPGYRGVRMRTWGKWVSEIREPRKKSRIWLGTFSTPEMAARAHDAAALTIKGTSAVLNFPELATYLPRPASSSPRDVQAAAAVAAAMDFSPSSSSLVVSDPTTVIAPAETQLSSSSYSTCTSSSLSPSSEEAASTAEELSEIVELPSLETSYDESLSEFVYVDSAYPPSSPWYINNCYSFYYHSDENGISMAEPFDSSNFGPLFP

SEQ ID NO: 256 - DNA, 3763 bp, Arabidopsis thaliana
ctctctgctgttacttgagctaggaagctattaacaacttgagtgaaagtttagggcttttgatgaagctctcacgcaaagagcttagctttgtataagctcagattcagattatttattgggtttattcttcagagaaagtaaagttgagtgatcatgaaagctccttcatcaaatggagtttctcctaatcctgttgaaggagaaaggagaaatataaactcagagctatggcacgcttgtgctgggccattgatttcgttgcctccagcaggaagtcttgttgtttacttccctcaaggtcacagtgagcaagtcgcggcttcaatgcagaagcagactgatttcataccaagttacccgaatcttccttccaagctcatatgcatgctccacaatgttacactgaatgctgatcctgagacggatgaggtctatgcgcagatgactcttcagccagtaaacaaatatgacagagatgcattgcttgcttctgacatgggtcttaagctaaacagacaacctaatgaatttttctgcaaaaccctcacggcgagtgacacaagtactcacggtggattttctgtaccccgacgagctgctgagaaaatctttcctgctctggatttctcgatgcaaccaccttgtcaggagcttgttgctaaggatattcatgacaacacatggactttcagacatatttatcgaggtcaaccaaaaaggcacttgctaactacaggctggagtgtgtttgtcagcacgaaaaggctctttgctggagactctgttctttttataagagatggaaaggcgcaacttctgttggggataagacgtgcaaatagacaacagcctgcactttcttcatctgtaatatcaagtgatagcatgcacatcggagttcttgcagctgcagctcatgctaatgctaataacagtcctttcaccattttctacaacccgagggctgctcctgctgagtttgtggttcctttagccaagtataccaaagcgatgtacgctcaagtttccctcggtatgcggtttagaatgatatttgagactgaagaatgtggagttcgtcggtatatgggtacagttaccggtatcagtgatcttgatccagtgagatggaaaaactctcagtggcggaatcttcagattggatgggatgagtcagctgctggtgataggcccagtcgagtttcagtttgggacattgaaccggttttaactcctttctacatatgtcctcctccatttttccgacctcgcttttctggacaacctggaatgccagatgatgagactgacatggagtctgcactgaagagagcaatgccatggcttgataatagcttagagatgaaagacccttcgagtactatctttcctggtctgagtttagttcagtggatgaatatgcagcagcagaacggccagctaccctctgctgctgcacagccaggtttcttcccatcaatgctttcgccaaccgcggcgctgcacaacaatcttggcggcactgatgatccctccaagttactgagctttcagacgccgcacggggggatttcctcctcaaatctccaatttaacaaacagaatcagcaagccccaatgtctcagttgcctcagccaccaactacgttgtcccaacaacagcagctgcagcaattgttgcactcctctttgaaccatcaacaacagcaatcgcagtctcaacaacagcaacaacaacaacagttgctgcagcagcaacaacaattgcagtctcaacaacacagcaacaacaatcaatcgcagtctcagcaacaacaacaattgctccagcagcaacaacaacaacaactgcagcaacaacatcaacaaccgttacagcaacagactcagcagcagcagctaagaacacagccattgcaatctcactcgcatccacagccacaacagttacaacaacataagttgcagcaacttcaggttccacagaatcagctttacaatggtcaacaagcagcgcagcagcatcagtcgcaacaagcatctacacatcatttgcaaccacaattagtttcgggatcaatggcaagcagtgtcatcacgcctccgtccagctcccttaatcaaagctttcaacagcaacaacaacagtctaagcaacttcaacaagcacatcaccatttaggtgctagcactagccagagtagtgtaattgaaaccagcaagtcttcatccaatctgatgtccgcaccgccgcaagagacacagttttcacgacaagtagaacagcagcagcctcctggtctcaacgggcagaatcagcaaacacttttgcagcagaaagctcaccaggcacaggcccaacagatattccagcagagtctcttggaacagccgcatatacagtttcagctgttacagagattacaacagcaacagcagcagcaatttctttcgccgcagtctcagttaccacaccatcaattgcaaagccagcagttgcaacagctgcctactctctctcaaggtcatcagtttccgtcatcttgcactaacaatggcttatcgacgttgcaaccacctcaaatgctggtgagccgacctcaggaaaaacaaaacccaccggttgggggaggggtcaaagcttattcaggcatcacagatggaggagatgcaccttcctcttcaacgtcgccttccaccaacaactgtcagatctcttcttcaggctttctcaacagaagccaaagcgggccagcgatcttgatacctgatgcagcgattgatatgtctggtaatcttgttcaggatctttacagcaaatccgatatgcggctaaaacaagaactcgtgggtcagcaaaagtccaaagctagtttaacagatcatcaactagaagcatctgcctctggaacttcttacggtttagatggaggcgaaaacaacagacaacaaaatttcttggctccaacttttggccttgacggtgattccaggaacagcttgctcggtggagctaatgttgataatggctttgtgcctgacacgctactctcgaggggatatgactcccagaaagatcttcagaacatgctttcaaactatggaggagtgacaaatgacattggtacagagatgtctacttcagctgtaagaactcaatcttttggtgtccccaatgtgcccgccatttcgaacgatctagctgtcaacgatgctggagttcttggtggtggattgtggccagctcagactcagcgaatgcgaacttatacaaaggtgcaaaaacgaggctcagtggggagatcaatagacgtcaaccgttacagaggttacgatgagctgaggcatgatctagcgcgcatgtttgggatcgaaggacagctcgaagatcctcaaacatctgactggaaacttgtttatgtcgatcatgaaaatgacatcctcctcgtcggcgatgatccatgggaagaattcgtaaactgtgttcagagcattaagatcctttcatcagctgaggttcagcagatgagcttagacgggaactttgccggtgtaccagttactaatcaagcttgtagtggcggtgacagtggcaatgcttggagaggtcattatgatgataactcagccacttcgtttaaccggtgatggcagaagagttctctcacagacaaagattcttttttcttcgttttgtaatataacttctcgttgataacatgtctcaagtttccactgggcactgtagagcatttacctg

SEQ ID NO: 257 - protein, 1164 aa, Arabidopsis thaliana
MKAPSSNGVSPNPVEGERRNINSELWHACAGPLISLPPAGSLVVYFPQGHSEQVAASMQKQTDFIPSYPNLPSKLICMLHNVTLNADPETDEVYAQMTLQPVNKYDRDALLASDMGLKLNRQPNEFFCKTLTASDTSTHGGFSVPRRAAEKIFPALDFSMQPPCQELVAKDIHDNTWTFRHIYRGQPKRHLLTTGWSVFVSTKRLFAGDSVLFIRDGKAQLLLGIRRANRQQPALSSSVISSDSMHIGVLAAAAHANANNSPFTIFYNPRAAPAEFVVPLAKYTKAMYAQVSLGMRFRMIFETEECGVRRYMGTVTGISDLDPVRWKNSQWRNLQIGWDESAAGDRPSRVSVWDIEPVLTPFYICPPPFFRPRFSGQPGMPDDETDMESALKRAMPWLDNSLEMKDPSSTIFPGLSLVQWMNMQQQNGQLPSAAAQPGFFPSMLSPTAALHNNLGGTDDPSKLLSFQTPHGGISSSNLQFNKQNQQAPMSQLPQPPTTLSQQQQLQQLLHSSLNHQQQQSQSQQQQQQQQLLQQQQQLQSQQHSNNNQSQSQQQQQLLQQQQQQQLQQQHQQPLQQQTQQQQLRTQPLQSHSHPQPQQLQQHKLQQLQVPQNQLYNGQQAAQQHQSQQASTHHLQPQLVSGSMASSVITPPSSSLNQSFQQQQQQSKQLQQAHHHLGASTSQSSVIETSKSSSNLMSAPPQETQFSRQVEQQQPPGLNGQNQQTLLQQKAHQAQAQQIFQQSLLEQPHIQFQLLQRLQQQQQQQFLSPQSQLPHHQLQSQQLQQLPTLSQGHQFPSSCTNNGLSTLQPPQMLVSRPQEKQNPPVGGGVKAYSGITDGGDAPSSSTSPSTNNCQISSSGFLNRSQSGPAILIPDAAIDMSGNLVQDLYSKSDMRLKQELVGQQKSKASLTDHQLEASASGTSYGLDGGENNRQQNFLAPTFGLDGDSRNSLLGGANVDNGFVPDTLLSRGYDSQKDLQNMLSNYGGVTNDIGTEMSTSAVRTQSFGVPNVPAISNDLAVNDAGVLGGGLWPAQTQRMRTYTKVQKRGSVGRSIDVNRYRGYDELRHDLARMFGIEGQLEDPQTSDWKLVYVDHENDILLVGDDPWEEFVNCVQSIKILSSAEVQQMSLDGNFAGVPVTNQACSGGDSGNAWRGHYDDNSATSFNR

SEQ ID NO: 258 - DNA, 1310 bp, Arabidopsis thaliana
cggaccttgacctctctgcttcccttcgtgcattttctctctctcactatcctctctctttctagtgtttgtttgatcctctgcgtactctgttcttcttctctcttcagataaaacaagtcctgcatattgaagatctgatgtcttatcgattgctaagtgtggataaggatgaactggttacgtcaccttgtttgaaagaacgtaactacttgggtctctctgattgttcctctgttgatagctcaactattcccaatgttgttgggaagagcaatctcaatttcaaagctactgaactgaggctaggtcttcctgagtctcaatctcctgagagagagactgatttcggtttgctgagtccgagaacacccgatgagaagcttctcttcccgttgctaccttctaaagacaatggttctgctactacagggcataagaatgttgtttctggtaacaagagaggatttgctgacacttgggatgagttttcgggtgtgaaaggatctgttagacctggaggaggaatcaacatgatgttgtcgccgaaagttaaggatgtctcgaagagtattcaagaagaaagatctcatgctaagggtggcttgaacaatgcaccagctgccaaggcacaggttgttggttggcctccaatcagatcataccggaagaatacaatggcttcttctacttcgaagaacactgatgaggttgatgggaaacctggtcttggtgttctgtttgtgaaggtgagcatggatggtgctccgtatctgagaaaggtcgacttgagaacttacacttcctatcaacagttgtcttctgcacttgagaaaatgttcagctgcttcacccttggtcaatgtggtcttcatggtgctcaagggagggaaagaatgagcgagattaaactgaaggatcttcttcatggatcagaatttgtgcttacttatgaagataaagacggtgattggatgcttgttggcgatgttccatgggagatatttactgaaacatgccagaaactgaagatcatgaagggttctgattctattggcttagctccaggtgcagtggagaaatcgaagaacaaagagcgggtttgaaacgaagatgctcaagacaaaaaaaaaacactatgcacagttccaatgtttaagttttatttactgatgtgtttgaaaactctttagtctttttactaatttgtgttgtaagactttggattctcttatttgtgtgtgcttgttcaaaacaaatacattcttatgtgtgtgtttctactttgaccttcaagatatttcgtctca

SEQ ID NO: 259 - protein, 321 aa, Arabidopsis thaliana
MSYRLLSVDKDELVTSPCLKERNYLGLSDCSSVDSSTIPNVVGKSNLNFKATELRLGLPESQSPERETDFGLLSPRTPDEKLLFPLLPSKDNGSATTGHKNVVSGNKRGFADTWDEFSGVKGSVRPGGGINMMLSPKVKDVSKSIQEERSHAKGGLNNAPAAKAQVVGWPPIRSYRKNTMASSTSKNTDEVDGKPGLGVLFVKVSMDGAPYLRKVDLRTYTSYQQLSSALEKMFSCFTLGQCGLHGAQGRERMSEIKLKDLLHGSEFVLTYEDKDGDWMLVGDVPWEIFTETCQKLKIMKGSDSIGLAPGAVEKSKNKERV

SEQ ID NO: 260 - DNA, 733 bp, Arabidopsis thaliana
ttactcatttgtcttaacctaaaattattataaaaaggatagagagagagagagagagctagagatatgggaagagggagaagttcatcgtcttcttcaatagagagtagcagcaagagcaacccattcggtgcttcgtcaagtactcgaaacctaagcacggacctgagactcggactcagcttcgggacatcctcagggactcaatatttcaacggtggctatgggtactccgttgcagctccggcggtagaggatgcggaatatgtggcggctgtggaggaggaagaagagaatgagtgtaacagtgtagggagcttttacgtgaaagtgaacatggaaggagttccaattggaagaaagatcgatctaatgtctcttaatggctaccgcgacttgatcagaacccttgatttcatgttcaacgcatccattctctgggctgaagaagaagacatgtgcaatgagaagagtcacgtgctaacgtacgcagataaggaaggtgactggatgatggttggagatgttccttgggagatgttcttgtctactgtgagaagactgaagatttcaagagctaattaccactactgatatataagtctacgtacttgttgtgtttaaatcgaagtaatgccaagaaaaaagtttttgcctgatgtaaatcaatggtcggatatttataatattattttcatttttctttaaaaaaaaaaaaaaaaaaaaaaaaaaa

SEQ ID NO: 261 - protein, 175 aa, Arabidopsis thaliana
MGRGRSSSSSSIESSSKSNPFGASSSTRNLSTDLRLGLSFGTSSGTQYFNGGYGYSVAAPAVEDAEYVAAVEEEEENECNSVGSFYVKVNMEGVPIGRKIDLMSLNGYRDLIRTLDFMFNASILWAEEEDMCNEKSHVLTYADKEGDWMMVGDVPWEMFLSTVRRLKISRANYHY

SEQ ID NO: 262 - DNA, 1002 bp, Arabidopsis thaliana
atgttggactacgaatgggataatccttcctccatcgttctctccggagatgaaagaaacccggactctgacccgacccggtcatccttctcctttttcgaccccatctcccattacaacaacgaccaccgtcacatcaccatttctcctcccctcctctcttccttctctaaccaacaacaacagcatcacctcaccctctacggtcagaccaacagcaacaaccagtttcttcatcatcaccatcaccaccactccttgtacgggtccaccaccaccaccactccttacggcgcctccgatcccatctaccatccccactcttccgctccgccagcctccttgttctcctacgaccagacaggaccgggctcgggatccggatcttcctacaacttcctcatccccaagacagaagtggatttcacgtccaacaggatcgggctgaacctgggaggccgtacgtacttctcagcggcggacgacgacttcgtgagcaggctatacaggaggtctcgaccaggtgagtcagggatggcgaactcgctgagcacgccgcggtgccaagcagagggatgcaacgcggatctgagccacgcgaaacactaccacagaaggcacaaagtgtgcgaattccactcaaaagcatcgacggttgtagccgccggactaagccaaaggttttgccagcaatgcagcaggttccatttgctgtcggaattcgacaacgggaaacggagctgccgtaagcgacttgctgaccataaccgccgccgccgtaaatgtcaccaatcagcctccgccacccaagacaccggcaccggcaagactactccaaagtcaccgaacgattcgggtgttaaagcgtcatcgtcaccgtcgtccaacgcgccgcctacgatatcactggagtgcttccggcaaaggcagttccaaacgacagcgtcttcatccacgtcagcgtcttcgtcttcaaattcaatgtttttctccagcggatag

SEQ ID NO: 263 - protein, 333 aa, Arabidopsis thaliana
MLDYEWDNPSSIVLSGDERNPDSDPTRSSFSFFDPISHYNNDHRHITISPPLLSSFSNQQQQHHLTLYGQTNSNNQFLHHHHHHHSLYGSTTTTTPYGASDPIYHPHSSAPPASLFSYDQTGPGSGSGSSYNFLIPKTEVDFTSNRIGLNLGGRTYFSAADDDFVSRLYRRSRPGESGMANSLSTPRCQAEGCNADLSHAKHYHRRHKVCEFHSKASTVVAAGLSQRFCQQCSRFHLLSEFDNGKRSCRKRLADHNRRRRKCHQSASATQDTGTGKTTPKSPNDSGVKASSSPSSNAPPTISLECFRQRQFQTTASSSTSASSSSNSMFFSSG

SEQ ID NO: 264 - DNA, 1462 bp, Arabidopsis thaliana
caaccatggcgaaagctctccaatgcatatttttttgatcttttccttttcccttcttttttgatcgctgcagagaaatggaaactcctgtgggtttaagattctgtccgaccgacgaggagatcgtcgtcgattacctttggccgaaaaattccgatagagacacgagccatgtcgatcgattcattaacacagtccctgtctgtagactcgatccttgggagttaccttgccagtcaaggatcaaactgaaagatgtggcttggtgtttcttcagacctaaggagaacaaatatggcagaggtgatcagcagatgagaaaaacgaaatctgggttttggaagagtactggcagaccaaagcctatcatgcgtaatcgccaacagatcggtgagaaaaagattttgatgttttacacgagtaaggaatccaaatccgattgggttatacacgagtaccacggtttctctcataaccagatgatgatgacatacacactctgtaaagttatgtttaatggtggcatgagagagaagtcttcctcttctccttcttcttctggtgttagtggaattgagcagagtcgtcgtgactctttaatccctcagcttgtcaacaattctgagggatcctcacttcacagagaagatccaagtcagtttggtgatgtgctgcaagaagctccaatcgaggatgctaaactgaccgaggaattggtaaaatggctgatgaatgatgaggatgatgctcaaatcgaggatgctataccgattgaggaatgggaaacatggttgaatgatattgatgatgctaaggagaagagtatcatgtttatgcatgataatcgaagtgattacagacctccaaactcattaactggtgtcttcagtgatgatgttagcagtgatgataatgattctgatttgctaactccaaaaacaaactctattcaaacttcgagcacttgtgatagttttggtagctcaaatcatcgcatagaccagatcaaagacctgcaagaatctcctacctcaacaatcaacttagtgtcactaactcaagaggtgagccaagctctaataaccagtattgataccgccgagaagaagaagaatccttatgatgatgcacaagggactgagattggtgagcataaattgggtcaagagacgatcaagaagaaaagagctggtttctttcacaggatgatacaaaaattcgtcaagaaaattcacctatgttcttccatctcaagaacttgataacaataaaagtgatcaataacaccttttctactttccaaattatttacaacagtacaagtgtatgctatgatgtctatcttggtttgtaactttaccatactgtatgtgtgatatgtataaaactggtaaatttgtgaagacaaatttgtatccattgacataataatgtctatcttgttttgttaaaaaaaaaaaaa

SEQ ID NO: 265 - protein, 394 aa, Arabidopsis thaliana
METPVGLRFCPTDEEIVVDYLWPKNSDRDTSHVDRFINTVPVCRLDPWELPCQSRIKLKDVAWCFFRPKENKYGRGDQQMRKTKSGFWKSTGRPKPIMRNRQQIGEKKILMFYTSKESKSDWVIHEYHGFSHNQMMMTYTLCKVMFNGGMREKSSSSPSSSGVSGIEQSRRDSLIPQLVNNSEGSSLHREDPSQFGDVLQEAPIEDAKLTEELVKWLMNDEDDAQIEDAIPIEEWETWLNDIDDAKEKSIMFMHDNRSDYRPPNSLTGVFSDDVSSDDNDSDLLTPKTNSIQTSSTCDSFGSSNHRIDQIKDLQESPTSTINLVSLTQEVSQALITSIDTAEKKKNPYDDAQGTEIGEHKLGQETIKKKRAGFFHRMIQKFVKKIHLCSSISRT

SEQ ID NO: 266 - DNA, 1071 bp, Arabidopsis thaliana
atggggaaaactaacttggcacctggttttcggtttcatccgactgatgttgaacttgtgagatactacttgaagaggaaagttatgggaaaaaagttccaagttgatgccattgctgaggtcgacatttacaagttcgaacctcctgatttacccgacaaatcatgtctagggactggagatcttaagtggtacttcttctgtccaagagaaaagaagtatcccaaaggcggtaaggcaaaccgctctactgaatgtggttactggaagaccacagggagagacagagatgtttcttataatgacgaagtcactgggaagataagaactctgatttatcactacgggaaaatacctcgcggtgatcggactgattgggtcatacatgaatatagacttgaagacaaagtactggctcaaaagaatgttcctcaggatacttatgtgctttgcgttctctttaagaaaaatggacttggaccaagacatggatctcaatatggtgctccatttaaggaagaggattggagtgataaggaagaagaatatactcagaatcatcttgtagctggtcctagtaaagaaaccagtctagctgctaaggcctcacactcgtacgctcctaaggatggtttgacaggagtgatctcagaatcttgcgtctctgatgtgccgccactaactgccacagtgcttccacctctaacaagtgatgttatagcttacaatcccttttcttcttcacctcttcttgaggttcctcaagtatctctcgatggtggcgagttaaattcgatgcttgatctcttttctgttgacaatgacgactgtttacttttcgacgatttcgactaccataatgaggtaagacatcctgatggttttgtaaacaaggaagctccggtgttcttaggagatggcaatttcagtggaatgtttgacctgagcaatgaccaagtcgtagagctacaggatctgatacagtcacccactcctcatcctccttctcctccagctcaagctagtattcctgatgactcaagaagcaacggtcagactaaggacgattaa

SEQ ID NO: 267 - protein, 356 aa, Arabidopsis thaliana
MGKTNLAPGFRFHPTDVELVRYYLKRKVMGKKFQVDAIAEVDIYKFEPPDLPDKSCLGTGDLKWYFFCPREKKYPKGGKANRSTECGYWKTTGRDRDVSYNDEVTGKIRTLIYHYGKIPRGDRTDWVIHEYRLEDKVLAQKNVPQDTYVLCVLFKKNGLGPRHGSQYGAPFKEEDWSDKEEEYTQNHLVAGPSKETSLAAKASHSYAPKDGLTGVISESCVSDVPPLTATVLPPLTSDVIAYNPFSSSPLLEVPQVSLDGGELNSMLDLFSVDNDDCLLFDDFDYHNEVRHPDGFVNKEAPVFLGDGNFSGMFDLSNDQVVELQDLIQSPTPHPPSPPAQASIPDDSRSNGQTKDD

SEQ ID NO: 268 - DNA, 890 bp, Arabidopsis thaliana
gcaaccttcaaactaaaactcgagagacaagaaatcctcagaatctttaacttaatggcgctcgaggctcttacatcaccaagattagcttctccgattcctcctttgttcgaagattcttcagtcttccatggagtcgagcactggacaaagggtaagcgatctaagagatcaagatccgatttccaccaccaaaacctcactgaggaagagtatctagctttttgcctcatgcttctcgctcgcgacaaccgtcagcctcctcctcctccggcggtggagaagttgagctacaagtgtagcgtctgcgacaagacgttctcttcttaccaagctctcggtggtcacaaggcaagccaccgtaagaacttatcacagactctctccggcggaggagatgatcattcaacctcgtcggcgacaaccacatccgccgtgactactggaagtgggaaatcacacgtttgcaccatctgtaacaagtcttttccttccggtcaagctctcggcggacacaagcggtgccactacgaaggaaacaacaacatcaacactagtagcgtgtccaactccgaaggtgcggggtccactagccacgttagcagtagccaccgtgggtttgacctcaacatccctccgatccctgaattctcgatggtcaacggagacgacgaagtcatgagccctatgccggcgaagaagcctcggtttgactttccggtcaaacttcaactttaaggaaatttacttagacgataagatttcgtttgtatactgttgagagttgtgtaggaatttgttgactgtacataccaaattggactttgactgattccaattcttcttgttctttcattttaaaaattattaaaccgattctttaccacaaa

SEQ ID NO: 269 - protein, 227 aa, Arabidopsis thaliana
MALEALTSPRLASPIPPLFEDSSVFHGVEHWTKGKRSKRSRSDFHHQNLTEEEYLAFCLMLLARDNRQPPPPPAVEKLSYKCSVCDKTFSSYQALGGHKASHRKNLSQTLSGGGDDHSTSSATTTSAVTTGSGKSHVCTICNKSFPSGQALGGHKRCHYEGNNNINTSSVSNSEGAGSTSHVSSSHRGFDLNIPPIPEFSMVNGDDEVMSPMPAKKPRFDFPVKLQL

SEQ ID NO: 270 - DNA, 922 bp, Arabidopsis thaliana
ttcctctacgtgctcacaatgaacaacaatcattcctatgatgatcgcagttttcacattccacttcatccttctaacacaagcaaccctaatccaaatctccagtttgctttatcttcaagctacgatcacagtcctaagaagaaacgcaccaaaaccgttgcttcatcctctagttcttcaccaaaatccgcgtcaaaaccaaaatacaccaaaaaaccagacccaaatgcccccaaaatcacacgtccatgtactgaatgtggcagaaagttttggtcttggaaggctctctttggtcacatgagatgtcaccctgagcgtcaatggcgtggcattaatcctcctcctaactaccgtgtgcccaccgcggcttcttcaaaacagttaaaccagatattaccaaattgggtctcatttatgtccgaggaagaccatgaagtcgcttcttgtctcttaatgctgtctaatggtacaccatcatcatcgagtattgaacggttcgagtgtggaggatgtaagaaagtgtttggatcacatcaggctttaggaggacacagagcgagtcataaaaacgttaaaggctgtttcgctatcacaaacgtaaccgatgatcctatgacggtttctacttctagtgggcatgatcatcagggaaaaatccttacgttttcagggcatcataagtgtaatatctgttttagagtgttctcgagtggtcaagctttaggaggtcacatgagatgtcattgggaaaaggaggaggagccgatgatcagtggtgctttggatttgaatgttcctccaacaatacaggatctttctacttcggacacatcagggtgttgtttagatcttaggttaggactctaattagtatctatatatatatataatgtctgtaggtatattggatgtttcc

SEQ ID NO: 271 - protein, 284 aa, Arabidopsis thaliana
MNNNHSYDDRSFHIPLHPSNTSNPNPNLQFALSSSYDHSPKKKRTKTVASSSSSSPKSASKPKYTKKPDPNAPKITRPCTECGRKFWSWKALFGHMRCHPERQWRGINPPPNYRVPTAASSKQLNQILPNWVSFMSEEDHEVASCLLMLSNGTPSSSSIERFECGGCKKVFGSHQALGGHRASHKNVKGCFAITNVTDDPMTVSTSSGHDHQGKILTFSGHHKCNICFRVFSSGQALGGHMRCHWEKEEEPMISGALDLNVPPTIQDLSTSDTSGCCLDLRLGL

SEQ ID NO: 272 - DNA, 1275 bp, Arabidopsis thaliana
atggatcctgaaggtttcacgagtggcttattccggtggaacccaacgagagcattggttcaagcaccacctccggttccacctccgctgcagcaacagccggtgacaccgcagacggctgcttttgggatgcgacttggtggtttagagggactattcggtccgtacggtatacgtttctacacggcggcgaagatagcggagttaggttttacggcgagcacgcttgtgggtatgaaggacgaggagcttgaagagatgatgaatagtctctctcatatctttcgttgggagcttcttgttggtgaacggtacggtatcaaagctgccgttagagctgaacggagacgattgcaagaagaggaggaagaggaatcttctagacgccgtcatttgctactctccgccgctggtgattccggtactcatcacgctcttgatgctctctcccaagaagatgattggacagggttatctgaggaaccggtgcagcaacaagaccagactgatgcggcggggaataacggcggaggaggaagtggttactgggacgcaggtcaaggaaagatgaagaagcaacagcagcagagacggagaaagaaaccaatgctgacgtcagtggaaaccgacgaagacgtcaacgaaggtgaggatgacgacgggatggataacggcaacggaggtagtggtttggggacagagagacagagggagcatccgtttatcgtaacggagcctggggaagtggcacgtggcaaaaagaacggcttagattatctgttccacttgtacgaacaatgccgtgagttccttcttcaggtccagacaattgctaaagaccgtggcgaaaaatgccccaccaaggtgacgaaccaagtattcaggtacgcgaagaaatcaggagcgagttacataaacaagcctaaaatgcgacactacgttcactgttacgctctccactgcctagacgaagaagcttcaaatgctctcagaagagcgtttaaagaacgcggtgagaacgttggctcatggcgtcaggcttgttacaagccacttgtgaacatcgcttgtcgtcatggctgggatatagacgccgtctttaacgctcatcctcgtctctctatttggtatgttccaacaaagctgcgtcagctttgccatttggagcggaacaatgcggttgctgcggctgcggctttagttggcggtattagctgtaccggatcgtcgacgtctggacgtggtggatgcggcggcgacgacttgcgtttctag

SEQ ID NO: 273 - protein, 424 aa, Arabidopsis thaliana
MDPEGFTSGLFRWNPTRALVQAPPPVPPPLQQQPVTPQTAAFGMRLGGLEGLFGPYGIRFYTAAKIAELGFTASTLVGMKDEELEEMMNSLSHIFRWELLVGERYGIKAAVRAERRRLQEEEEEESSRRRHLLLSAAGDSGTHHALDALSQEDDWTGLSEEPVQQQDQTDAAGNNGGGGSGYWDAGQGKMKKQQQQRRRKKPMLTSVETDEDVNEGEDDDGMDNGNGGSGLGTERQREHPFIVTEPGEVARGKKNGLDYLFHLYEQCREFLLQVQTIAKDRGEKCPTKVTNQVFRYAKKSGASYINKPKMRHYVHCYALHCLDEEASNALRRAFKERGENVGSWRQACYKPLVNIACRHGWDIDAVFNAHPRLSIWYVPTKLRQLCHLERNNAVAAAAALVGGISCTGSSTSGRGGCGGDDLRF

SEQ ID NO: 274 - DNA, 1374 bp, Arabidopsis thaliana
atggctgatccggcgattaagctctttggaaagacgattcctttacctgagcttggtgttgttgattcttcttctagctataccggatttttaaccgaaactcagattcctgttcggttatcagattcgtgtaccggcgatgatgatgatgaagagatgggtgattccggtttaggacgagaagaaggtgatgatgttggtgatggtggaggagagagcgagactgataaaaaggaagaaaaagatagtgagtgtcaggaagagtcattgaggaatgaatctaatgatgttactactactacatcgggtataactgaaaaaacggaaacaacaaaagctgcaaagacgaatgaagagtcaggtggtactgcttgctctcaagaggggaagttaaagaaacctgataagattctaccgtgtccgcgatgtaacagcatggaaaccaagttctgttactacaacaactataatgttaaccaacctcgccatttctgcaagaaatgtcagagatattggacagctggtggaacgatgaggaatgttccggttggtgctgggagacgtaagaataagagtccagcttctcattataaccgtcatgtaagtataacatctgcggaagctatgcagaaggtggcgagaactgatcttcaacatcctaatggtgcaaatcttctcacttttggctctgattctgtgctttgtgaatctatggcttctggattgaatcttgttgagaagtcattgttgaagacacaaactgtattgcaagaacccaatgaaggcttgaagattacggttccgttaaaccagacaaacgaagaagctggaacagtcagcccgttaccaaaagttccatgctttccaggaccaccaccaacttggccttacgcttggaacggagtttcgtggacgattttaccgttttaccctccaccggcttactggagctgcccgggggtttcaccgggggcatggaacagcttcacatggatgccacaacccaattcaccatctggttccaatccaaattctcctacactaggtaaacattcacgtgacgagaacgctgctgaaccaggaaccgcttttgatgaaaccgagtcacttggtagggagaaaagcaaacccgagagatgcttgtgggttcccaagacgctgaggattgatgatccagaggaagctgctaaaagttccatctgggaaacattagggatcaaaaaagacgaaaatgcggatactttcggagctttcagatcatcaaccaaagaaaaaagcagtctttctgaaggaagacttccgggaagaagaccggagttgcaagcgaatcctgctgctctttctaggtcagcaaacttccatgagagctcatag

SEQ ID NO: 275 - protein, 457 aa, Arabidopsis thaliana
MADPAIKLFGKTIPLPELGVVDSSSSYTGFLTETQIPVRLSDSCTGDDDDEEMGDSGLGREEGDDVGDGGGESETDKKEEKDSECQEESLRNESNDVTTTTSGITEKTETTKAAKTNEESGGTACSQEGKLKKPDKILPCPRCNSMETKFCYYNNYNVNQPRHFCKKCQRYWTAGGTMRNVPVGAGRRKNKSPASHYNRHVSITSAEAMQKVARTDLQHPNGANLLTFGSDSVLCESMASGLNLVEKSLLKTQTVLQEPNEGLKITVPLNQTNEEAGTVSPLPKVPCFPGPPPTWPYAWNGVSWTILPFYPPPAYWSCPGVSPGAWNSFTWMPQPNSPSGSNPNSPTLGKHSRDENAAEPGTAFDETESLGREKSKPERCLWVPKTLRIDDPEEAAKSSIWETLGIKKDENADTFGAFRSSTKEKSSLSEGRLPGRRPELQANPAALSRSANFHESS

SEQ ID NO: 276 - DNA, 708 bp, Arabidopsis thaliana
atggagtggtcaacaacgagcaacgtagaaaacgtgagagtagctttcatgccaccgccatggccggagtctagttcctttaactcgctccacagcttcaactttgatccttacgcaggaaattcatatacgcctggcgatacacaaaccggaccggttatctctgtaccggaatcagaaaagatcatgaatgcgtaccgatttccgaacaacaacaatgagatgataaaaaagaagagactaacgagtggacaattagcttcacttgagcgaagttttcaagaagagatcaaattagattcagacaggaaggtgaagctgtcgagagagctcggtctgcagccacgtcagatagcagtttggttccaaaaccgccgtgcacggtggaaggcgaagcagcttgagcagttgtacgactcgcttagacaagagtacgacgtcgtttctagggagaaacaaatgttacacgatgaggtgaagaagctgagagctttactaagagaccagggtttgatcaagaagcaaatctctgccgggaccatcaaagtttccggtgaggaagacacggtggagatttcatcggtggtggtagctcatccaagaacggagaatatgaacgcaaatcaaatcaccggagggaatcaagtttacggtcaatacaacaatccgatgctggttgcttcctctggctggccgtcatacccctga

SEQ ID NO: 277 - protein, 235 aa, Arabidopsis thaliana
MEWSTTSNVENVRVAFMPPPWPESSSFNSLHSFNFDPYAGNSYTPGDTQTGPVISVPESEKIMNAYRFPNNNNEMIKKKRLTSGQLASLERSFQEEIKLDSDRKVKLSRELGLQPRQIAVWFQNRRARWKAKQLEQLYDSLRQEYDVVSREKQMLHDEVKKLRALLRDQGLIKKQISAGTIKVSGEEDTVEISSVVVAHPRTENMNANQITGGNQVYGQYNNPMLVASSGWPSYP

SEQ ID NO: 278 - DNA, 842 bp, Arabidopsis thaliana
cagagatctgacggcggtagcagagtaatctattccttcccaaaatgtctcgcaattagattctttccaagttcttctgtaaatcccaagtcccgctcttttcctctttatccttttcaccagcttcgctactaagacaacaaatctttccctctctctctcgcctgatcgatcttcaaagagtaagaaaaatgcaggaacaagcgactagctctttagctgcaagctctttaccatcaagcagcgagaggtcatcaagctctgctccacatttggagatcaaagaaggaattgaaagcgatgaggagatacggcgagtgccggagtttggaggagaagctgtcggaaaagaaacttccggtagagaatctggatcggcgaccggtcaggagcggacacaggcgactgtcggagaaagtcaaaggaagcgagggaggacaccggcggagaaagagaacaagcggctgaagaggttgttgaggaacagagtttcagctcagcaagcaagagagaggaaaaaggcttacttgagcgagttggaaaacagagtgaaagacttggagaacaaaaactctgaacttgaagagcgactctctactcttcagaacgagaaccagatgcttagacatattctgaagaacacaacaggaaacaagagaggaggtggtggtggttctaatgctgatgcaagcctttgatctccttcttcttcttgtgttatatttttgtggataaaatttacagagaattgtatcaataattatcatgttaaaattatatgggatgtgagagctaatattgcaattgtagaccaagttctcttaaaaaaaaaaaaaaaaaaa

SEQ ID NO: 279 - protein, 168 aa, Arabidopsis thaliana
MQEQATSSLAASSLPSSSERSSSSAPHLEIKEGIESDEEIRRVPEFGGEAVGKETSGRESGSATGQERTQATVGESQRKRGRTPAEKENKRLKRLLRNRVSAQQARERKKAYLSELENRVKDLENKNSELEERLSTLQNENQMLRHILKNTTGNKRGGGGGSNADASL

SEQ ID NO: 280 - DNA, 1407 bp, Arabidopsis thaliana
aaagttgctagctttaatttgccaacttactattcttatgtgtaataatcgtttgcagggtcgttgatttggtgataagtcagtagaaatggataaggagaaatctccagcacctccttgtggaggtcttcctcctccatctccatcaggtcgatgctctgcattctcagaagctggtcccattggtcatggttcagatgctaatcgaatgagtcatgatattagccgtatgcttgataacccacctaagaagattggacatcggcgagctcattctgaaatacttactctccctgatgatttgagctttgatagtgatcttggtgtggttggtaatgctgctgatggagcttctttctctgatgagactgaagaagatttgctctctatgtatcttgatatggataagtttaattcttctgctacatcttctgcccaagttggtgagccatcaggaactgcttggaaaaatgagacaatgatgcagacaggcacaggctcaacttccaatcctcagaatacggttaatagtcttggcgaaaggccaagaatcaggcatcaacatagccaatctatggatggttcaatgaatatcaatgagatgcttatgtcgggaaatgaagatgattctgctattgatgctaagaagtctatgtctgctactaaacttgctgagcttgctctcattgatcctaaacgtgctaagaggatatgggcaaacaggcagtccgcagcacgatcaaaagaaaggaagacgagatacatatttgagcttgagagaaaagtacagactttgcaaacagaggctacaactctctcagcccagttgaccctcttacagagagacacaaatggcttgactgttgaaaacaatgagctgaagctgcggttacaaacaatggagcagcaggttcacttgcaggatgaactaaacgaagcactaaaggaggaaatccagcatctgaaggtgttgactggccaagttgctccatcagcgttgaactatgggtcgtttggatcaaaccagcagcaattctattccaacaatcagtcaatgcaaacaatcttagctgcaaaacagttccagcaacttcagattcattcacagaagcagcaacaacaacaacaacaacaacaacagcaacaccaacagcagcagcagcaacagcaacagtatcagtttcaacagcaacagatgcaacagcttatgcagcagcggcttcaacagcaagaacaacaaaatggagtaagactcaagccttcacaagcccagaaagagaactgaggaatatgaatatgtcccacgtaagtgagaggttctccttctgaacaattcctttctcattcataaattgttgttcatccatcacttgcagtctcttggattttagggttttagctaacaca

SEQ ID NO: 281 - protein, 398 aa, Arabidopsis thaliana
MDKEKSPAPPCGGLPPPSPSGRCSAFSEAGPIGHGSDANRMSHDISRMLDNPPKKIGHRRAHSEILTLPDDLSFDSDLGVVGNAADGASFSDETEEDLLSMYLDMDKFNSSATSSAQVGEPSGTAWKNETMMQTGTGSTSNPQNTVNSLGERPRIRHQHSQSMDGSMNINEMLMSGNEDDSAIDAKKSMSATKLAELALIDPKRAKRIWANRQSAARSKERKTRYIFELERKVQTLQTEATTLSAQLTLLQRDTNGLTVENNELKLRLQTMEQQVHLQDELNEALKEEIQHLKVLTGQVAPSALNYGSFGSNQQQFYSNNQSMQTILAAKQFQQLQIHSQKQQQQQQQQQQQHQQQQQQQQQYQFQQQQMQQLMQQRLQQQEQQNGVRLKPSQAQKEN

SEQ ID NO: 282 - DNA, 1294 bp, Arabidopsis thaliana
gaccggctaaagtcaagaacctctctctgagctctcaccactttctctctctactccctctctgcgtgtaggatactactagacaattgacaaccaaagactaaagctgtgttgttggttcacttctgttctcttttccaatgttgtcatcagctaagcatcagagaaaccatagactctctgctacaaacaagaaccagactctcaccaaagtttcttccatttcatcctcatcaccatcgtcttcttcttcatcatcatcaacctcatcatcatctcctttaccttctcaagactctcaagcccagaagagatctcttgtcaccatggaagaagtttggaatgacatcaaccttgcttccatccaccacctaaaccgacacagccctcatccacaacacaaccacgagccaaggttcaggggccaaaaccaccacaaccaaaaccctaactcaatcttccaagattttctcaaaggatctttgaaccaggaaccagcacccacaagccagaccacgggttctgcgcctaatggcgattccaccacggtcactgttctttacagctctccttttccacctcctgcaactgttctgagcttgaattccggcgctggcttcgagtttctcgataaccaagatcctcttgttacctcaaactctaatcttcatacccaccatcacctctcaaacgctcatgccttcaacacctctttcgaggctctggttccatccagttcttttggtaagaaaagaggccaagattccaatgaaggttcagggaatagaagacataagcgtatgatcaagaacagagaatctgcagctcgttcccgcgctaggaaacaggcttatacaaacgagttagaacttgaagttgctcacttgcaggcagaaaatgcaagactcaagagacaacaagatcaaaaaatggctgcagcaattcagcaacccaaaaagaacacacttcaacggtcttccacagctccattttgagaaatctacaagtccttgtttctcttttggggattgagattgtctcatgaagaagtgaaaaaatggcaaaagtttgtacccttttttattagctataagtataactaagcctaaaattgtagaactaagatattgtaggggaaaaaagaagatgtaaaacaaaagacccggaaagagaaaaggatctttcaatttcctaaggcacaggaacacctgtcctgggtcctctcttaatgttctgtcgttttcctatgcaaacccttttttcacttctgtactaacttatacttgtattcttg

SEQ ID NO: 283 - protein, 284 aa, Arabidopsis thaliana
MLSSAKHQRNHRLSATNKNQTLTKVSSISSSSPSSSSSSSSTSSSSPLPSQDSQAQKRSLVTMEEVWNDINLASIHHLNRHSPHPQHNHEPRFRGQNHHNQNPNSIFQDFLKGSLNQEPAPTSQTTGSAPNGDSTTVTVLYSSPFPPPATVLSLNSGAGFEFLDNQDPLVTSNSNLHTHHHLSNAHAFNTSFEALVPSSSFGKKRGQDSNEGSGNRRHKRMIKNRESAARSRARKQAYTNELELEVAHLQAENARLKRQQDQKMAAAIQQPKKNTLQRSSTAPF

SEQ ID NO: 284 - DNA, 2290 bp, Arabidopsis thaliana
aaaaacagactgagagagagagagagagagtgtgttgttggccatgggatgcacggcctccaagctcgacagtgaggatgctgtccgtcgctgcaaggagcggcgccgtcttatgaaggacgccgtctacgctcgtcaccatctcgccgccgctcactctgactactgccgctcccttcgtctcactggctctgccctctcctccttcgccgccggcgagcccctctccgtctccgagaatactcccgctgtttttctccgcccttcctccagtcaggacgcgccacgtgtcccttcttcccattccccagaaccccctcctccgcccatccgcagcaagcctaagcctactaggcctaggaggcttccacacattctctccgactcctctccttcttcctctcctgccaccagtttctatcccactgctcaccagaactctacttactctcgctctccatctcaagcttcctctgtctggaactgggagaatttctaccctccctctccccccgactccgagtacttcgaacgcaaagctcgccagaaccacaagcaccgtcctccttccgactacgacgccgaaactgaaagatccgaccacgattactgccactcacggagagatgccgccgaggaagttcactgcagcgagtggggcgacgaccacgaccgtttcactgccacctcttcgtccgacggagatggggaggtcgaaactcacgtttccagatccggtattgaagaagagcctgtgaaacaaccacatcaagacccaaatggcaaagagcactctgaccatgttaccacttcttccgactgctacaagaccaaattggtggtaaggcacaagaatttgaaggagatccttgacgccgttcaagactacttcgacaaggctgcctccgctggggaccaggtctccgccatgcttgagatcggccgggctgagctcgaccgcagcttcagcaagctgaggaagacggtgtatcattcaagcagtgtgttcagcaacttgagcgcaagctggacctcaaaacccccattggcagtcaaatacaagctcgatgcatctaccctgaatgatgaacaaggcggcctcaagagcctctgctccactctagaccgactcctcgcttgggaaaagaagctttatgaggatgtcaaggcaagagaaggagttaagattgagcacgagaagaagctgtctgcgctgcagagtcaggagtataagggaggtgatgaatccaagctagacaagactaaaacttccataaccagactgcaatcactcatcattgtttcttcagaagctgttttaaccacgtctaatgccattctccgcctccgggacactgaccttgtccctcagcttgttgaactctgccacggattaatgtacatgtggaagtcaatgcacgagtatcacgaaatccagaacaacatcgtgcaacaagtccgtggcctgatcaaccaaacagagagaggtgagtcaacatcagaggtacaccggcaggtgacgcgggacctagagtcagctgtgtccttgtggcattcgagcttctgtcgcatcattaaattccagagggagttcatatgctctctccacgcatggttcaagctgagcctggttcccctgagcaacggagacccaaagaaacagcggccagactcatttgccttgtgcgaggagtggaagcagagcctggaacgggtgcctgacacagtggcgtcagaagccataaagagctttgtaaacgtggtacatgtgatatcaataaagcaggcggaagaggtgaagatgaagaaacgcacggagagtgcaggaaaggagctggagaagaaagcatcctcactgaggagcatagagaggaagtactaccaggcatactcgacggttgggataggccctggaccggaggtgttggactcacgggacccgctatctgagaagaaatgtgagctggcggcatgtcagaggcaggtggaggatgaggtaatgaggcacgtgaaggctgtggaggtgacacgagctatgactctcaacaatctacaaaccggcctgcccaatgtattccaggccttgaccagcttctcatctctcttcactgaatctctccagactgtctgttctcgttcctactccatcaactgattatgtccaagtttctcatttatttttaagctctcattacgttggtatcatgtaaatttgaggattgattaaattgagtcttgtggttttgtgaggactcacaatctttctcatttaaaaaaaaaaaaaaaaaaa

SEQ ID NO: 285 - protein, 703 aa, Arabidopsis thaliana
MGCTASKLDSEDAVRRCKERRRLMKDAVYARHHLAAAHSDYCRSLRLTGSALSSFAAGEPLSVSENTPAVFLRPSSSQDAPRVPSSHSPEPPPPPIRSKPKPTRPRRLPHILSDSSPSSSPATSFYPTAHQNSTYSRSPSQASSVWNWENFYPPSPPDSEYFERKARQNHKHRPPSDYDAETERSDHDYCHSRRDAAEEVHCSEWGDDHDRFTATSSSDGDGEVETHVSRSGIEEEPVKQPHQDPNGKEHSDHVTTSSDCYKTKLVVRHKNLKEILDAVQDYFDKAASAGDQVSAMLEIGRAELDRSFSKLRKTVYHSSSVFSNLSASWTSKPPLAVKYKLDASTLNDEQGGLKSLCSTLDRLLAWEKKLYEDVKAREGVKIEHEKKLSALQSQEYKGGDESKLDKTKTSITRLQSLIIVSSEAVLTTSNAILRLRDTDLVPQLVELCHGLMYMWKSMHEYHEIQNNIVQQVRGLINQTERGESTSEVHRQVTRDLESAVSLWHSSFCRIIKFQREFICSLHAWFKLSLVPLSNGDPKKQRPDSFALCEEWKQSLERVPDTVASEAIKSFVNVVHVISIKQAEEVKMKKRTESAGKELEKKASSLRSIERKYYQAYSTVGIGPGPEVLDSRDPLSEKKCELAACQRQVEDEVMRHVKAVEVTRAMTLNNLQTGLPNVFQALTSFSSLFTESLQTVCSRSYSIN

SEQ ID NO: 286 - DNA, 978 bp, Arabidopsis thaliana
atgcatagtttgaatgaaacagtaattcctgatgttgattacatgcagtctgatagagggcatatgcatgctgctgcctctgattccagtgatcgatcaaaggataagttggatcaaaagacccttcgtaggcttgctcaaaatcgtgaggcagcaagaaaaagcagattgaggaagaaggcgtatgttcagcagctggaagatagtcgattaaagctgactcaagttgagcaggagctgcaaagagcaagacagcagggagttttcatctcaagttcaggagaccaagctcattctactggtggcaatggtggggctttggcatttgatgcagaacactcacgatggcttgaagaaaagaacaggcaaatgaacgagctgagatctgccctgaatgctcatgcaggtgatactgagctccggataattgtggatggagtgatggctcactatgaggagcttttcaggattaagagcaatgcatctaagaatgatgtcttccacttgttatctggaatgtggaaaacaccagctgagcgatgtttcttgtggcttggcgggttcccgtcatccgaacttctcaagcttcttgcgaatcagctagagcccatgacagaacgacaggtaatgggcatcaatagcttgcagcagacgtcgcagcaggcagaagatgctttatctcaagggatggagagtttacagcaatccctagctgatactttatccagtggaactcttggttccagttcatcggataatgtcgcgagctacatgggtcagatggccatggcaatgggcaagttaggcaccctcgaaggattcatacgccaggctgataacttgaggctgcaaacactacaacagatgcttcgagtattaacaacacgtcagtcagctcgtgctcttcttgctatacacgattattcatctcgattacgtgctcttagttccttgtggcttgcccggccaagagagtga

SEQ ID NO: 287 - protein, 325 aa, Arabidopsis thaliana
MHSLNETVIPDVDYMQSDRGHMHAAASDSSDRSKDKLDQKTLRRLAQNREAARKSRLRKKAYVQQLEDSRLKLTQVEQELQRARQQGVFISSSGDQAHSTGGNGGALAFDAEHSRWLEEKNRQMNELRSALNAHAGDTELRIIVDGVMAHYEELFRIKSNASKNDVFHLLSGMWKTPAERCFLWLGGFPSSELLKLLANQLEPMTERQVMGINSLQQTSQQAEDALSQGMESLQQSLADTLSSGTLGSSSSDNVASYMGQMAMAMGKLGTLEGFIRQADNLRLQTLQQMLRVLTTRQSARALLAIHDYSSRLRALSSLWLARPRE

SEQ ID NO: 288 - DNA, 1054 bp, Arabidopsis thaliana
ccaaaaaacaaagcattctatgctattctgttctgttctccaatgttgtcatcagcaaagcataataagatcaacaaccatagtgccttttcaatttcctcttcatcatcatcattatcaacatcatcctccctaggccataacaaatctcaagtcaccatggaagaagtatggaaagaaatcaaccttggttcacttcactaccatcggcaactaaacattggtcatgaaccaatgttaaagaaccaaaaccctaataactccatctttcaagatttcctcaacatgcctctgaatcaaccaccaccaccaccaccaccaccttcctcttccaccattgtcactgctctctatggctctctgcctcttccgcctcctgccactgtcctcagcttaaactccggtgttggattcgagtttcttgataccacagaaaatcttcttgcttctaaccctcgctcctttgaggaatctgcaaagtttggttgtcttggtaagaaaagaggccaagattctgatgatactagaggagacagaaggtataagcgtatgatcaagaacagagaatctgctgctcgttcaagggctaggaagcaggcatatacaaacgaacttgagcttgaaattgctcacttgcagacagagaatgcaagactcaagatacaacaagagcagctgaaaatagccgaagcaactcaaaaccaagtaaagaaaacactacaacggtcttccacagctccattttgagaaaaatctactatttctttttgggggagtttcaagtgtttcttatgaagatgagaaaaacagaaaaagtttgtacattttagctaagttaaatttgtggtggtaagtaatgtaaaagaaaagtgtgtgtagaagaaaagtgtctagaaaaagaaagcaactaactttcttcttcttctctggtttcctatcaactcttttgacttttgtactttttttcttctctacttaacctctattattgtaatgccaagtcaagtccttatctagctagtacatgagtttctgttttcactggttaagccat

SEQ ID NO: 289 - protein, 234 aa, Arabidopsis thaliana
MLSSAKHNKINNHSAFSISSSSSSLSTSSSLGHNKSQVTMEEVWKEINLGSLHYHRQLNIGHEPMLKNQNPNNSIFQDFLNMPLNQPPPPPPPPSSSTIVTALYGSLPLPPPATVLSLNSGVGFEFLDTTENLLASNPRSFEESAKFGCLGKKRGQDSDDTRGDRRYKRMIKNRESAARSRARKQAYTNELELEIAHLQTENARLKIQQEQLKIAEATQNQVKKTLQRSSTAPF

SEQ ID NO: 290 - DNA, 1394 bp, Arabidopsis thaliana
taatttctctacttcagatttttttctccttagattaatttaattgagttattgtacatccctcaagctaagattctggttttgtgagttgagtggatgagaagaggagagattaactaaattagggtttcaattgtttactttttgtttgctttttatatcaagtaatggatcaggtctctcgctctcttcctccaccttttctctcaagagatctccatcttcacccacaccatcaattccagcatcagcagcagcagcagcaacagaatcacggccacgatatagaccagcaccgaatcggtgggctaaaacgtgaccgagatgctgatatcgatcccaacgagcactcttcagccggaaaagatcaaagtactcctggctccggtggagaaagcggcggcggaggaggaggagataatcacatcacgagaaggccacgtggcagaccagcgggatctaagaacaaaccaaaaccgccaatcatcatcactcgagacagcgcaaacgctctcaaatctcatgtcatggaagtagcaaacggatgtgacgtcatggaaagtgtcaccgtcttcgctcgccgtcgccaacgtggcatctgcgttttgagcggaaacggcgccgttaccaacgttaccataagacaaccagcttcagtacctggtggtggctcatctgtcgttaacttacacggacgtttcgagattctttctctctcgggatcattccttcctcctccggctccaccagctgcgtcaggtctaacgatttacttagccggtggtcagggacaggttgttggaggaagcgtggttggtccactcatggcttcaggacctgtagtgattatggcagcttcgtttggaaacgctgcgtatgagagactgccgttggaggaagacgatcaagaagagcaaacagctggagcggttgctaataatatcgatggaaacgcaacaatgggtggtggaacgcaaacgcaaactcagacgcagcagcaacagcaacaacagttgatgcaagatccgacgtcgtttatacaagggttgcctccgaatcttatgaattctgttcaattgccagctgaagcttattggggaactccgagaccatctttctaaatcgcgaagaaaaaacaagttagatacgttcgttgtttttaatttataatctctcttctgtcaagttttaattttctttttcttcttctttgttttctaaagataattgtagtctttgacgaagattcgtggtacgtatgaatcgaagagaatcgttttggtcatgggattgctcgatctattaggtttgagagggggtttgtgttttgcgttgactagcagattataaaattgttgattttcgagtttttattttcatgtgttggtgataaa

SEQ ID NO: 291 - protein, 317 aa, Arabidopsis thaliana
MDQVSRSLPPPFLSRDLHLHPHHQFQHQQQQQQQNHGHDIDQHRIGGLKRDRDADIDPNEHSSAGKDQSTPGSGGESGGGGGGDNHITRRPRGRPAGSKNKPKPPIIITRDSANALKSHVMEVANGCDVMESVTVFARRRQRGICVLSGNGAVTNVTIRQPASVPGGGSSVVNLHGRFEILSLSGSFLPPPAPPAASGLTIYLAGGQGQVVGGSVVGPLMASGPVVIMAASFGNAAYERLPLEEDDQEEQTAGAVANNIDGNATMGGGTQTQTQTQQQQQQQLMQDPTSFIQGLPPNLMNSVQLPAEAYWGTPRPSF

SEQ ID NO: 292 - DNA, 1263 bp, Arabidopsis thaliana
aattccatcctaataattttcaaagctttaattctaagaaataatatctacaagaaaatattatctcatgtatggagactaccggagaagttgttaaaacaaccaccgggagcgacggaggcgttacggtggtgagatccaacgcgccgtcagacttccacatggctccgaggtcagaaacttcaaacacacctcccaactccgtcgctcctcctcctcctccaccgccgcaaaactcctttactccgtcggcggctatggatggtttctcaagcggaccgataaagaagagacgtgggcgccctaggaagtacggacacgacggagcagcggtgacgctatctccgaatccgatatcatcagccgcaccaacgacttctcacgtcatcgatttctcgacgacatcggagaaacgtggcaaaatgaaaccagcaactccaactccaagctcattcatcaggccaaagtaccaggtcgagaatttaggtgaatggtctccttcctctgccgccgctaatttcacgccgcatattattacggtgaatgcaggcgaggacgttacgaagaggataatatcattttctcaacaagggtctctagctatttgcgttttatgcgcaaacggtgtcgtttcgagcgttacacttcgtcagcctgattcatctggtggtacattgacctatgagggtcggtttgagatattgtcactatctggaacattcatgcctagtgactcagacgggacacgaagcagaacaggcgggatgagcgtgtcgcttgctagccctgatggacgtgtagtaggtggtggtgttgctggcttgctggttgcagccactcctattcaagtggttgtaggaactttcttaggtggaacaaaccagcaagaacagacaccgaagccgcataaccacaacttcatgtcttctccattaatgccaacttcttcgaatgtagctgatcatcgaaccatccgtcccatgacatctagtctcccgatcagtacatggacaccgtcttttccttctgattcacgacacaagcattctcatgactttaatatcactttgacgtgatttcttccttgaagaactcgtagatcctctgtattttggtttccagtttagggctctacatgttagactctcaaagtctaggtgttatgttggtctgtcacttaggattgtcacttaggattgttagaccatctccatcaatggtttctcattgagaaactgttcaatataaaaataaaatataatc

SEQ ID NO: 293 - protein, 334 aa, Arabidopsis thaliana
METTGEVVKTTTGSDGGVTVVRSNAPSDFHMAPRSETSNTPPNSVAPPPPPPPQNSFTPSAAMDGFSSGPIKKRRGRPRKYGHDGAAVTLSPNPISSAAPTTSHVIDFSTTSEKRGKMKPATPTPSSFIRPKYQVENLGEWSPSSAAANFTPHIITVNAGEDVTKRIISFSQQGSLAICVLCANGVVSSVTLRQPDSSGGTLTYEGRFEILSLSGTFMPSDSDGTRSRTGGMSVSLASPDGRVVGGGVAGLLVAATPIQVVVGTFLGGTNQQEQTPKPHNHNFMSSPLMPTSSNVADHRTIRPMTSSLPISTWTPSFPSDSRHKHSHDFNITLT

SEQ ID NO: 294 - DNA, 1519 bp, Arabidopsis thaliana
ttttttcttttctttctttttttgctggtgtgagaaattgtacgcttactatctctctctctctctgccagattctctctttttgatgatgtgaaagttgtgcttttgtttcttaagaaaaaggcatatttttaatacttgattcttggttcttgattcttgattcttggttttttttagcttcttaagttcggtgatgtcgtcttccaccaatgactacaacgatggtaataacaatggagtgtaccctctctctctttacctttcttcactctctggccatcaagacatcattcataatccctacaaccatcagttaaaagcatctccgggccatatggtatcagcagttcctgaatctctgatcgattacatggcgtttaagtcaaataatgttgtgaatcaacaaggctttgagtttcctgaggtgtcaaaggaaatcaagaaggtggtgaagaaggaccgacatagcaagattcaaacggcacaagggattagagacaggagggttaggctttttattgggattgctcgccaattctttgatcttcaggatatgttggggtttgataaagctagtaaaacgttagactggctgctcaagaagtcaagaaaagccatcaaagaggtcgtacaagcaaaaaacctcaacaatgatgatgaagattttggaaacattggaggcgatgtagaacaagaagaggagaaggaggaggatgacaatggcgataagagcttcgtgtatggtttgagccccgggtacggtgaagaagaagtggtatgtgaggccacgaaggcagggataagaaagaagaagagtgagttgagaaacatctcatcaaaggggctaggagccaaagctagaggaaaagcaaaggagcgaacaaaagagatgatggcctatgataatccagagactgcctctgatattacacaatctgaaatcatggacccattcaagaggtctatagtcttcaatgaaggagaagatatgacacaccttttctacaaggaaccaatcgaggagtttgataatcaagaatctatcttaaccaatatgactctaccaacgaagatgggtcaaagttacaatcaaaataatgggatacttatgttggtagatcagagttctagcagcaactataatacatttctgcctcaaaatttggattatagttatgatcaaaacccttttcatgaccaaaccttatatgtagtcaccgacaaaaatttccccaaaggtttcctataaatctcgacagttttgaaggactatgcatgatcaagtttaaacatgtaagccaatatagtcccttattcctctgaatgtatacaaaatctatagttatgtatatctgttcctttttaacgtatctttattgatcttctgtgccttgatcaaaattgtcattttaagattcagtttgtgtaatattttagctacaacttttaagtggtattattgtaaccttttgaactatatattttgaagatgaataagaacatgtttatataaaaa

SEQ ID NO: 295 - protein, 351 aa, Arabidopsis thaliana
MSSSTNDYNDGNNNGVYPLSLYLSSLSGHQDIIHNPYNHQLKASPGHMVSAVPESLIDYMAFKSNNVVNQQGFEFPEVSKEIKKVVKKDRHSKIQTAQGIRDRRVRLFIGIARQFFDLQDMLGFDKASKTLDWLLKKSRKAIKEVVQAKNLNNDDEDFGNIGGDVEQEEEKEEDDNGDKSFVYGLSPGYGEEEVVCEATKAGIRKKKSELRNISSKGLGAKARGKAKERTKEMMAYDNPETASDITQSEIMDPFKRSIVFNEGEDMTHLFYKEPIEEFDNQESILTNMTLPTKMGQSYNQNNGILMLVDQSSSSNYNTFLPQNLDYSYDQNPFHDQTLYVVTDKNFPKGFL

SEQ ID NO: 296 - DNA, 1242 bp, Arabidopsis thaliana
cagatctgttctttacaccaaattgagtactgaagatcttgttgagtgaattaaagagatgagatcaggagaatgtgatgaagaggagattcaagcaaagcaagaaagagatcaaaatcaaaatcatcaagtaaacttaaaccacatgttgcaacaacaacagccgagttcggtatcatcttcaaggcaatggacttcagcttttaggaatccaagaatcgttcgagtctcaagaacattcggtggcaaagacagacacagcaaagtatgtacagtccgtggtcttcgagaccggaggataaggttgtccgtacctacagctattcaactctacgaccttcaagatcgattagggctgagtcagccaagcaaagtcattgattggttactcgaagcagcaaaagatgacgtagacaagctacctcctctacaattcccacatggatttaaccagatgtatccaaatctcatcttcggaaactccgggtttggagaatctccatcttcaactacatcaacaacgtttccaggaaccaatctcgggttcttggaaaattgggatcttggtggttcttcaagaacaagagcaagattaaccgatacaactacgacccaaagagaaagttttgatcttgataaaggaaaatggatcaaaaacgacgagaatagtaatcaagatcatcaagggtttaacaccaatcatcaacaacaatttcctctgaccaatccgtacaacaacacttcagcttattacaaccttggacatcttcaacaatcgttagaccaatctggtaataacgttactgtcgcaatatctaatgttgctgctaataataacaataatctcaatttgcatcctccttcctcgtctgccggagatggatctcagctttttttcggtcctactcctccggcaatgagctctctattcccgacatacccttcgtttcttggagcttctcatcatcatcatgtcgtcgatggagccggtcatcttcagctctttagctcgaattcaaataccgcatcgcagcaacacatgatgccgggtaatacgagtttgattagaccatttcatcatttgatgagctcgaatcatgatacggatcatcatagtagcgataatgaatcagattcttgaatgattttatatatctacactatacattgaaaatgttatatgtatacgtattcttctatattttgatatatatgcgtattgttggattggtttatgtatct

SEQ ID NO: 297 - protein, 360 aa, Arabidopsis thaliana
MRSGECDEEEIQAKQERDQNQNHQVNLNHMLQQQQPSSVSSSRQWTSAFRNPRIVRVSRTFGGKDRHSKVCTVRGLRDRRIRLSVPTAIQLYDLQDRLGLSQPSKVIDWLLEAAKDDVDKLPPLQFPHGFNQMYPNLIFGNSGFGESPSSTTSTTFPGTNLGFLENWDLGGSSRTRARLTDTTTTQRESFDLDKGKWIKNDENSNQDHQGFNTNHQQQFPLTNPYNNTSAYYNLGHLQQSLDQSGNNVTVAISNVAANNNNNLNLHPPSSSAGDGSQLFFGPTPPAMSSLFPTYPSFLGASHHHHVVDGAGHLQLFSSNSNTASQQHMMPGNTSLIRPFHHLMSSNHDTDHHSSDNESDS

SEQ ID NO: 298 - DNA, 826 bp, Arabidopsis thaliana
gaattgaacttggaccagcacagcaacaacccaaccccaatgaccagctcagtcatagtagccggcgccggtgacaagaacaatggtatcgtggtccagcagcaaccaccatgtgtggctcgtgagcaagaccaatacatgccaatcgcaaacgtcataagaatcatgcgtaaaaccttaccgtctcacgccaaaatctctgacgacgccaaagaaacgattcaagaatgtgtctccgagtacatcagcttcgtgaccggtgaagccaacgagcgttgccaacgtgagcaacgtaagaccataactgctgaagatatcctttgggctatgagcaagcttgggttcgataactacgtggaccccctcaccgtgttcattaaccggtaccgtgagatagagaccgatcgtggttctgcacttagaggtgagccaccgtcgttgagacaaacctatggaggaaatggtattgggtttcacggcccatctcatggcctacctcctccgggtccttatggttatggtatgttggaccaatccatggttatgggaggtggtcggtactaccaaaacgggtcgtcgggtcaagatgaatccagtgttggtggtggctcttcgtcttccattaacggaatgccggcttttgaccattatggtcagtataagtgaagaaggagttattcttcatttttatatctattcaaaacatgtgtttcgatagatattttatttttatgtcttatcaataacatttctatataatgttgcttctttaaggaaaagtgttgtatgtcaatactttatgagaaactgatttatatatgcaaat

SEQ ID NO: 299 - protein, 208 aa, Arabidopsis thaliana
MTSSVIVAGAGDKNNGIVVQQQPPCVAREQDQYMPIANVIRIMRKTLPSHAKISDDAKETIQECVSEYISFVTGEANERCQREQRKTITAEDILWAMSKLGFDNYVDPLTVFINRYREIETDRGSALRGEPPSLRQTYGGNGIGFHGPSHGLPPPGPYGYGMLDQSMVMGGGRYYQNGSSGQDESSVGGGSSSSINGMPAFDHYGQYK

SEQ ID NO: 300 - DNA, 2868 bp, Arabidopsis thaliana
ctttgtgaacaaaacacatctcgtatacttcagatctagactcgaaaattttagacctctttacaattggtctttgttcatctgaagttggagaaaatagttagcttaggtcggatcttttcatatgctttggatcctccttcgtctcttttgtataattttaaccttatcaagagttctttttgaatctcaaaagattatatagtagtatagaaggtttatatgtatatgtatagccagatagtttatgttgtttaaagattcgatgatagccaagttgggttaactttctttttccttgcctccttactcacatacaaaccctatctgtccgtacaaaatactaaaaaccctaacttttctctctccaccaatctagtttattgtttcatttccacttcaacgatgaaaagcttgcatgtggcggccaacgccggagatctggctgaggattgtggaatactcggtggagacgctgatgatactgttttgatggatggaattgatgaagttggtagagagatctggttagatgaccatggaggagataataatcatgttcatggtcatcaagatgatgatttgattgttcatcatgacccttcaatcttctatggagatctcccaacgcttcctgatttcccatgcatgtcgtcttcatcatcgtcttcaacatctccagctcctgtcaacgcaatcgtctcctcagcctcttcttcttcggcagcttcttcctccacttcctcagctgcttcttgggctatattgagatcagatggagaagatccgactccaaaccaaaaccaatacgcatcaggaaactgtgacgactcttctggtgcattgcaatccacagcttccatggagattccattagacagcagtcaaggttttggttgcggcgaaggcggtggtgattgcattgatatgatggagactttcgggtacatggatctacttgatagcaacgagttctttgacacctcagctatatttagccaagacgacgacacgcaaaaccctaacttgatggaccaaacccttgagagacaagaagaccaggtcgttgttccgatgatggagaataacagtggtggagacatgcaaatgatgaattcttccttggaacaggacgatgatctcgctgctgtgtttttggagtggctaaagaacaacaaggagactgtgtcggctgaggatttgaggaaagtaaagataaagaaagctacgattgaatcagcggcaagaagactaggcggtggtaaagaagcgatgaagcagcttttaaagctgattcttgaatgggtccaaactaatcacttacaaagaagacgcaccaccaccaccaccaccaacctctcttatcaacaatcattccaacaagatccatttcaaaaccctaaccctaataacaacaacctaatcccaccgtccgaccaaacctgtttctcaccttcaacatgggttcctccaccaccacaacaacaagcttttgtctcggacccgggttttggatacatgcctgctccaaactatccgccacagccagagttccttcctttacttgaatctccaccgtcatggccaccaccaccacagtctggtcccatgccacatcaacaattccccatgccgccaacctcgcagtataatcaatttggagatccaacaggtttcaatggatacaacatgaatccgtaccaatatccttatgttcctgcaggacaaatgagagatcagagattactccgtttgtgttcctcagcaactaaagaggcaagaaagaaacggatggcgagacagaggaggttcttgtctcatcaccacagacataacaacaacaacaacaacaacaacaataatcagcagaaccaaacccaaatcggagaaacctgtgccgcggtggctccacaacttaaccccgtggccacaaccgccacgggagggacctggatgtattggcctaatgtcccggcagtgccgcctcaattaccgccagtgatggagactcagttacctaccatggaccgagctggctcagcttctgctatgccacgtcagcaggtggtaccagatcgccggcagggatggaaaccagaaaagaatttgcggtttctcttgcagaaagtcttgaagcaaagcgacgtgggtaacctcggaaggatcgttttgccaaaaaaagaagctgagacacacttgccggagctagaggcaagagacggcatctctctggccatggaagacatcggaacctctcgtgtttggaacatgcgctacaggttttggcctaacaacaaaagcaggatgtatctcctcgagaacaccggcgattttgtgaaaaccaatgggctccaagaaggtgatttcatagtcatatactccgacgtcaaatgtggcaaatatttgatacgaggggttaaagtaagacaaccgagcggacaaaagccggaggccccaccgtcgtcagcagctacgaagagacaaaacaagtcgcaaaggaacataaacaataactctccgtcggcgaatgtggtggtcgcttcaccaacttctcaaactgttaaatgaaaaacagagacaaaaagaaacaatataaatattattatgtaccaaataagaaagagggcaaaaggaaaaaatggcagcgtacccgagtgtgccacttctcgtgcatgcatgggatcttgaagacaaatggagggtcatgattaaagctgtttggtcagggtccgggtttttactccattttttgccttttcttgtcgagtcggttcttttataactctttactctttttaccttcaggatattgtagagatgattaattctggaaatggtgtttgtgttataaaaaaaaaaaaaaaaaaa

SEQ ID NO: 301 - protein, 720 aa, Arabidopsis thaliana
MKSLHVAANAGDLAEDCGILGGDADDTVLMDGIDEVGREIWLDDHGGDNNHVHGHQDDDLIVHHDPSIFYGDLPTLPDFPCMSSSSSSSTSPAPVNAIVSSASSSSAASSSTSSAASWAILRSDGEDPTPNQNQYASGNCDDSSGALQSTASMEIPLDSSQGFGCGEGGGDCIDMMETFGYMDLLDSNEFFDTSAIFSQDDDTQNPNLMDQTLERQEDQVVVPMMENNSGGDMQMMNSSLEQDDDLAAVFLEWLKNNKETVSAEDLRKVKIKKATIESAARRLGGGKEAMKQLLKLILEWVQTNHLQRRRTTTTTTNLSYQQSFQQDPFQNPNPNNNNLIPPSDQTCFSPSTWVPPPPQQQAFVSDPGFGYMPAPNYPPQPEFLPLLESPPSWPPPPQSGPMPHQQFPMPPTSQYNQFGDPTGFNGYNMNPYQYPYVPAGQMRDQRLLRLCSSATKEARKKRMARQRRFLSHHHRHNNNNNNNNNNQQNQTQIGETCAAVAPQLNPVATTATGGTWMYWPNVPAVPPQLPPVMETQLPTMDRAGSASAMPRQQVVPDRRQGWKPEKNLRFLLQKVLKQSDVGNLGRIVLPKKEAETHLPELEARDGISLAMEDIGTSRVWNMRYRFWPNNKSRMYLLENTGDFVKTNGLQEGDFIVIYSDVKCGKYLIRGVKVRQPSGQKPEAPPSSAATKRQNKSQRNINNNSPSANVVVASPTSQTVK

SEQ ID NO: 302 - DNA, 1500 bp, Arabidopsis thaliana
aatcgaccattcacaacgatgacattcaaacactcttcagtttcccttccttcttgattcgtcctctccactatttttctcaatttctttaatctctctctttctctctctacttcctcttcctcttcttcttcttcttcttcttcatctatggaccctttagcttcccaacatcaacacaaccatctggaagataataaccaaaccctaacccataataatcctcaatccgattccaccaccgactcatcaacttcctccgctcaacgcaaacgcaaaggcaaaggtggtccggacaactccaagttccgttaccgtggcgttcgacaaagaagctggggcaaatgggtcgccgagatccgagagccacgtaagcgcactcgcaagtggcttggtactttcgcaaccgccgaagacgccgcacgtgcctacgaccgggctgccgtttacctatacgggtcacgtgctcagctcaacttaaccccttcgtctccttcctccgtctcttcctcttcctcctccgtctccgccgcttcttctccttccacctcctcttcctccactcaaaccctaagacctctcctccctcgccccgccgccgccaccgtaggaggaggagccaactttggtccgtacggtatcccttttaacaacaacatcttccttaatggtgggacctctatgttatgccctagttatggttttttccctcaacaacaacaacaacaaaatcagatggtccagatgggacaattccaacaccaacagtatcagaatcttcattctaatactaacaataacaagatttctgacatcgagctcactgatgttccggtaactaattcgacttcgtttcatcatgaggtggcgttagggcaggaacaaggaggaagtgggtgtaataataatagttcgatggaggatttgaactctctagctggttcggtgggttcgagtctatcaataactcatccaccgccgttggttgatccggtatgttctatgggtctggatccgggttatatggttggagatggatcttcgaccatttggccttttggaggagaagaagaatatagtcataattgggggagtatttgggattttattgatcccatcttgggggaattctattaatttgtttttgtggaagatcatattatatacgatgagcatccctaaggtcggtcaagagcattggagattcattgttgagaggaatcaaagagattgcattctatgaggagctctgcatgcaaaattttggaggatttttttactacctatagagataaataagagggtatttttattatttttttgaagatttttattttcaaggaattcgtaaaagagattacggttccaataaagtatgtatatgtggaagagaatcggaggagatggtggaaagttgtatgggaattttattggttcaacacttccttcacagtgtgcctaccttaatatataattattgataggatatgataatttctg

SEQ ID NO: 303 - protein, 328 aa, Arabidopsis thaliana
MDPLASQHQHNHLEDNNQTLTHNNPQSDSTTDSSTSSAQRKRKGKGGPDNSKFRYRGVRQRSWGKWVAEIREPRKRTRKWLGTFATAEDAARAYDRAAVYLYGSRAQLNLTPSSPSSVSSSSSSVSAASSPSTSSSSTQTLRPLLPRPAAATVGGGANFGPYGIPFNNNIFLNGGTSMLCPSYGFFPQQQQQQNQMVQMGQFQHQQYQNLHSNTNNNKISDIELTDVPVTNSTSFHHEVALGQEQGGSGCNNNSSMEDLNSLAGSVGSSLSITHPPPLVDPVCSMGLDPGYMVGDGSSTIWPFGGEEEYSHNWGSIWDFIDPILGEFY

SEQ ID NO: 304 - DNA, 2136 bp, Arabidopsis thaliana
gaattaaaaggtttaacctttacctttttttcccttcactatcgataattgatcttctctttcggctgaatataaatctgaaaaaatggatcaagatcagcatcctcagtacggtataccggagctccggcagctcatgaaaggcggaggaaggacgactactacaacaccgtctacttcttctcattttccctctgatttcttcggttttaaccttgctccggtgcagccaccgccacaccgtcttcatcagttcactactgatcaagatatgggtttcttgccacgtggcatacatggattgggtggaggttcttcaacggctggaaataacagtaacttaaacgcgagtactagtggtggaggagttgggtttagtgggtttcttgacggtggtggtttcggcagcggagtaggaggagacggtggaggaactggaaggtggccgagacaagaaaccctaactctgttggaaattagatctcgtcttgatcataaattcaaagaagctaatcataaaggacctctttgggatgaagtttctaggattatgtccgaggaacatggataccaaaggagtgggaagaaatgcagagagaagtttgagaatctgtacaaatactatagtaagactaaagaaggcgaagccggaagacaagacggaaaacatcacagatttttccgccagctccaagcgctatacggggattctaataacttggtttcttgtcccaatcataacacgcagttcatgagcagtgctcttcatggtttccatactcaaaaccctatgaacgttgctacaacaacgtccaacatccataacgttgatagtgttcatggttttcatcaaagccttagtctttctaacaactacaactcctccgagcttgagctgatgacttcctcttcggaagggaatgattctagtagtagaaggaaaaagaggagttggaaagcgaagataaaggagttcattgatacgaacatgaaaaggttgatagagaggcaagatgtttggcttgagaagttgacaaaggttattgaagacaaagaggaacaacggatgatgaaagaagaggaatggaggaagattgaagctgcaaggattgataaagagcatttgttttgggctaaagagagggcgaggatggaagctagggatgttgcggtgattgaggcattgcaatacttgacaggaaagccattgataaagccgctgtgttcatccccggaagagaggacaaatggtaataatgagatccgaaacaatagtgagacacagaatgagaatggaagcgatcaaacgatgactaacaatgtttgtgttaaaggaagtagtagctgctggggtgagcaagagattttaaagcttatggagataagaacgagcatggactcgacctttcaagagatattaggagggtgctcggatgagtttctatgggaggaaatcgcagcgaagttgattcagttagggtttgatcagagaagtgccttattatgcaaggaaaagtgggaatggataagcaatggaatgaggaaagaaaagaagcaaatcaacaagaaaagaaaggataattcgtccagctgcggcgtgtactacccgagaaacgaagaaaatccaatctacaataatcgagaaagtggatataatgataatgatccgcatcaaatcaacgaacaaggcaatgtaggttcttcaacatcaaacgcaaacgcaaacgcaaacgtaaccactggaaatccgagcggtgcaatggctgctagtacaaactgcttcccgttcttcatgggagatggagatcagaatttgtgggagagttatggtttgaggctcagtaaagaagagaatcagtaagtaatttctcttaatgaagaagaagaaggtaatcatgtggttaactaattcttttgagttagctatatatgagataaaccttgacttagctattatatgtcacatgctgcttagaattaagaaatatttgttggggcttaacgaattatatatcagcatatataagatgagagtctaagaattatatcaaattaggctttaaccaacgtacgattatatattatgttttcatgtatttattctgtaagactttttaatatcaatctttctctaaa

SEQ ID NO: 305 - protein, 591 aa, Arabidopsis thaliana
MDQDQHPQYGIPELRQLMKGGGRTTTTTPSTSSHFPSDFFGFNLAPVQPPPHRLHQFTTDQDMGFLPRGIHGLGGGSSTAGNNSNLNASTSGGGVGFSGFLDGGGFGSGVGGDGGGTGRWPRQETLTLLEIRSRLDHKFKEANHKGPLWDEVSRIMSEEHGYQRSGKKCREKFENLYKYYSKTKEGEAGRQDGKHHRFFRQLQALYGDSNNLVSCPNHNTQFMSSALHGFHTQNPMNVATTTSNIHNVDSVHGFHQSLSLSNNYNSSELELMTSSSEGNDSSSRRKKRSWKAKIKEFIDTNMKRLIERQDVWLEKLTKVIEDKEEQRMMKEEEWRKIEAARIDKEHLFWAKERARMEARDVAVIEALQYLTGKPLIKPLCSSPEERTNGNNEIRNNSETQNENGSDQTMTNNVCVKGSSSCWGEQEILKLMEIRTSMDSTFQEILGGCSDEFLWEEIAAKLIQLGFDQRSALLCKEKWEWISNGMRKEKKQINKKRKDNSSSCGVYYPRNEENPIYNNRESGYNDNDPHQINEQGNVGSSTSNANANANVTTGNPSGAMAASTNCFPFFMGDGDQNLWESYGLRLSKEENQ

SEQ ID NO: 306 - DNA, 1029 bp, Arabidopsis thaliana
atggatacggctcagtggccacaggagattgtagtgaagcccttggaagaaatagtaacaaacacatgcccaaagccgcaaccgcaaccgcttcaaccgcagcagccaccgtcggtgggtggagagaggaaggcaaggccagaaaaggatcaagctgtaaactgtccgagatgtaactcaaccaacacaaagttttgttactacaacaattatagtttgacgcagccaagatacttctgcaaaggttgtagaaggtattggaccgaaggcggttcgcttaggaacattcctgttggcggtggctcaagaaagaacaagagatctcactcttcttcttctgatattagtaacaatcactcggattctacacaaccagctacaaagaagcatctctctgatcatcaccaccacctcatgagcatgtctcaacaaggtttgaccggtcaaaaccctaaattccttgagacgacccaacaagatctcaatttaggtttttcaccacatgggatgattaggaccaacttcactgacctcatccacaacattggcaacaacaccaacaagagcaacaacaataacaatccattgattgtttcttcatgttctgccatggctacttcttctctggatctcataagaaacaatagtaacaatgggaattcttcaaattcttccttcatgggatttccagttcataatcaagatccagcatcaggagggttttcaatgcaagatcattacaagccttgcaacacaaacaccacactgctagggttttcattagatcatcatcataataatggatttcatggagggtttcaaggaggagaagaaggtggagaaggtggtgatgatgtgaatggaaggcacttgtttccttttgaggatttgaaattgccagtttcttcttcatcagcaacaattaatgtcgacattaatgaacatcagaagcgaggaagcggtagtgatgcagctgctacgtctggtgggtattggactgggatgttgagtggaggatcatggtgctaa

SEQ ID NO: 307 - protein, 342 aa, Arabidopsis thaliana
MDTAQWPQEIVVKPLEEIVTNTCPKPQPQPLQPQQPPSVGGERKARPEKDQAVNCPRCNSTNTKFCYYNNYSLTQPRYFCKGCRRYWTEGGSLRNIPVGGGSRKNKRSHSSSSDISNNHSDSTQPATKKHLSDHHHHLMSMSQQGLTGQNPKFLETTQQDLNLGFSPHGMIRTNFTDLIHNIGNNTNKSNNNNNPLIVSSCSAMATSSLDLIRNNSNNGNSSNSSFMGFPVHNQDPASGGFSMQDHYKPCNTNTTLLGFSLDHHHNNGFHGGFQGGEEGGEGGDDVNGRHLFPFEDLKLPVSSSSATINVDINEHQKRGSGSDAAATSGGYWTGMLSGGSWC

SEQ ID NO: 308 - DNA, 869 bp, Arabidopsis thaliana
ttctgctctgttttggtaaattgaggaaatggaagagaggcataagtgcaagttatgttggaagagcttcgctaatggaagggctttgggaggtcacatgaggtctcacatgctcattcaccctctccccagtcagcccgagtcatattcgtcttccatggctgatccagggtttgttcttcaggacagagagagtgaaaccgagtcgtccaagaagccctcccgcaaacgatccagacttaaccggagatccatctcatcattacgtcatcaacaatccaacgaagaagggaaaagtgaaaccgcaagagcagcagatatcaagatcggggttcaagaactcagtgagtcgtgtacggagcaggaaccgatgagttcggtgtcggacgctgcaacaacggaagaagacgtggccttgagtctcatgttgctgtcgagagacaagtgggagaaggaggaagaggaaagtgatgaagagagatggaagaagaagaggaataagtggttcgagtgcgagacttgcgagaaagtgtttaagtcgtatcaggcgttagggggacacagagcaagccacaagaagaagatagcagaaacagatcaattaggctcagatgagttgaagaagaagaagaagaagagtactagtagtcaccatgaatgtccaatctgtgccaaagtcttcacatctggtcaagctctcggaggtcacaaaagatctcacgcttccgctaataatgaattcacgagaagatcaggaataataattagcttgatagatctaaatctcccagcgccatcggaggaggaagagatggcctcgtcggttttttaatgcttgatcagattggtcaaactatagtaattaccac

SEQ ID NO: 309 - protein, 267 aa, Arabidopsis thaliana
MEERHKCKLCWKSFANGRALGGHMRSHMLIHPLPSQPESYSSSMADPGFVLQDRESETESSKKPSRKRSRLNRRSISSLRHQQSNEEGKSETARAADIKIGVQELSESCTEQEPMSSVSDAATTEEDVALSLMLLSRDKWEKEEEESDEERWKKKRNKWFECETCEKVFKSYQALGGHRASHKKKIAETDQLGSDELKKKKKKSTSSHHECPICAKVFTSGQALGGHKRSHASANNEFTRRSGIIISLIDLNLPAPSEEEEMASSVF

SEQ ID NO: 310 - DNA, 606 bp, Arabidopsis thaliana
atgagcggaggaggagacgtgaacatgagtggtggagacagacgcaagggaacggtgaagtggtttgatacacagaaggggtttggtttcatcacacctagcgacggtggtgacgatctcttcgttcaccagtcttccatcagatctgaaggatttcgtagcctcgcagctgaggaatctgttgagttcgacgttgaggttgacaactccggccgtcccaaggctattgaagtgtctggacccgacggtgctcccgttcagggtaacagcggtggtggtggttcatctggtggacgcggtggttttggcggcggtggtggaagaggagggggacgtggtggaggaagctacggaggaggttatggtggaagaggaagcggtggccgtggaggaggtggtggtgataattcttgctttaagtgcggtgaaccaggtcacatggcgagagaatgctctcaaggtggtggaggatacagcggaggcgggggtggtggaaggtacgggtctggcggcggcggaggaggaggtggtggtggcttaagctgctacagctgtggagagtctgggcactttgcaagggattgcactagcggtggtgctcgttga

SEQ ID NO: 311 - protein, 201 aa, Arabidopsis thaliana
MSGGGDVNMSGGDRRKGTVKWFDTQKGFGFITPSDGGDDLFVHQSSIRSEGFRSLAAEESVEFDVEVDNSGRPKAIEVSGPDGAPVQGNSGGGGSSGGRGGFGGGGGRGGGRGGGSYGGGYGGRGSGGRGGGGGDNSCFKCGEPGHMARECSQGGGGYSGGGGGGRYGSGGGGGGGGGGLSCYSCGESGHFARDCTSGGAR

SEQ ID NO: 312 - DNA, 774 bp, Arabidopsis thaliana
atgggaagatcaccatgctgcgagaaagctcacatgaacaaaggagcttggactaaagaagaagatcagcttcttgttgattacatccgtaaacacggtgaaggttgctggcgatctctccctcgcgccgctggattacaaagatgtggtaagagttgtagattgagatggatgaattatctaagaccagatctcaaaagaggcaattttactgaagaagaagatgaactcatcatcaagctccatagcttgctcggtaacaaatggtctttaatagctgggagattaccaggaagaacagataacgagatcaagaactattggaacactcatatcaagaggaagcttctcagccgtgggattgatccaaactctcaccgtctgatcaacgaatccgtcgtgtctccgtcgtctcttcaaaacgatgtcgttgagactatacatcttgatttctctggaccggttaaaccggaaccggtgcgtgaagagattggtatggttaataattgtgagagtagtggaacgacgtcggagaaggattatgggaacgaggaagattgggtgttgaatttggaactctctgttggaccgagttatcggtacgagtcgactcggaaagtgagtgttgttgactcggctgagtcgactcgacggtggggttccgagttgtttggagctcatgagagtgatgcggtgtgtttgtgttgtcggattgggttgtttcgtaatgagtcgtgtcggaattgtcgggtttctgatgttagaactcattag

SEQ ID NO: 313 - protein, 257 aa, Arabidopsis thaliana
MGRSPCCEKAHMNKGAWTKEEDQLLVDYIRKHGEGCWRSLPRAAGLQRCGKSCRLRWMNYLRPDLKRGNFTEEEDELIIKLHSLLGNKWSLIAGRLPGRTDNEIKNYWNTHIKRKLLSRGIDPNSHRLINESVVSPSSLQNDVVETIHLDFSGPVKPEPVREEIGMVNNCESSGTTSEKDYGNEEDWVLNLELSVGPSYRYESTRKVSVVDSAESTRRWGSELFGAHESDAVCLCCRIGLFRNESCRNCRVSDVRTH

SEQ ID NO: 314 - DNA, 1158 bp, Arabidopsis thaliana
ccaacttggacaacatcatttaaattataaaaccctccaataaataaaacttggtttatccaatcatcttatttctctgtgctctccaccattttacataaaccccaaaatctctcttcatcatcatcattcatcaacatcatctctctttctctatctcgctgtccctccttctctttctcattcattgcaatgggcagaagatgctcacactgtggaaacgtaggacataactcaagaacatgttcttcttaccaaacaagagtagttaggctctttggtgttcatctagacaccacaagctcttctccgccgcctcctcctcctccctcgattttggccgctgcaataaagaaaagtttcagcatggattgcttgccggcatgttcctcctcttcctcttcctttgctggttatctctccgatggtctcgcccataaaacacctgaccgcaaaaaaggggttccatggacggcggaagagcaccggacgtttctaattggattagaaaagcttggaaaaggagattggagaggaatctctagaaacttcgtcgtcacaaaatccccgacacaagtggcaagtcatgctcaaaaatactttctccggcaaactaccactctccatcacaagagacgccgcaccagcctctttgatatggtttcggccggcaatgttgaagaaaatagtactactaagaggatatgtaatgatcatattgggtcgagctcaaaggttgtttggaaacaaggattactcaatcctcgtcttggatatccagatccgaaagtatcagtatccggctcgggtaactccggtggactcgatcttgagctgaagcttgcgtccattcaatctcctgaatcgaatattagacctattagcgttacgtgaatctatataacacgttatgatcagtttcattagaataattcaaatgtttacatatataatatcttatcgatcctatctaatttgattttgatttaacgttagttactttgataatttcgtcgatattgtttttttggttttttcattgtgagattttttgtcttggaagttggatccatacatatttctgtaaaactttatatttaaggtatatatatctagcgctcataaaagtttcaatattccaaaaaaaaaaaaaaaaaa

SEQ ID NO: 315 - protein, 233 aa, Arabidopsis thaliana
MGRRCSHCGNVGHNSRTCSSYQTRVVRLFGVHLDTTSSSPPPPPPPSILAAAIKKSFSMDCLPACSSSSSSFAGYLSDGLAHKTPDRKKGVPWTAEEHRTFLIGLEKLGKGDWRGISRNFVVTKSPTQVASHAQKYFLRQTTTLHHKRRRTSLFDMVSAGNVEENSTTKRICNDHIGSSSKVVWKQGLLNPRLGYPDPKVSVSGSGNSGGLDLELKLASIQSPESNIRPISVT

SEQ ID NO: 316 - DNA, 1056 bp, Arabidopsis thaliana
atgggaagaccaccttgctgtgaaaagattggagtgaagaaagggccatggacaccagaggaagacatcatcttggtttcttacatccaagaacatggtcctggaaactggagatctgtcccaacacacacaggtttaagatgtagcaagagctgcagattgagatggactaattatcttcgacccggtattaagcgtggaaattttactgagcatgaagagaagacaattgttcatcttcaagcccttttaggcaacagatgggcagccatagcatcataccttccagaaaggacagacaatgatataaagaactattggaacactcacttgaagaagaagctcaaaaagattaatgaatctggtgaagaagataatgatggtgtctcttcatcaaacactagttcacaaaagaaccatcaaagcactaacaaaggtcaatgggaaagaagacttcagacagacattaacatggcaaaacaagctctttgtgaggccttgtctttagacaaaccatcatccactctttcatcatcttcatcattaccgacaccagtaatcacacaacaaaacatccgtaacttctcatcagctttgcttgaccgttgttatgatccatcctcttcttcttcatctaccacaaccaccactacaagcaacactactaatccatacccatcaggggtatatgcgtcaagtgctgagaacatcgcccggttgcttcaagatttcatgaaagacacacccaaggctttaactttatcatcttcatctccggtttcagagactggaccactcactgctgcagtctcggaagaaggtggagaagggtttgaacaatctttcttcagcttcaattcaatggacgaaactcaaaacttgactcaggagacaagcttcttccatgatcaagtgatcaaaccggaaataacaatggaccaagatcatggtctaatatcacaagggtctctgtctttgtttgagaaatggttatttgatgagcaaagccacgagatggttggtatggcactagcaggacaagaagggatgttctag

SEQ ID NO: 317 - protein, 351 aa, Arabidopsis thaliana
MGRPPCCEKIGVKKGPWTPEEDIILVSYIQEHGPGNWRSVPTHTGLRCSKSCRLRWTNYLRPGIKRGNFTEHEEKTIVHLQALLGNRWAAIASYLPERTDNDIKNYWNTHLKKKLKKINESGEEDNDGVSSSNTSSQKNHQSTNKGQWERRLQTDINMAKQALCEALSLDKPSSTLSSSSSLPTPVITQQNIRNFSSALLDRCYDPSSSSSSTTTTTTSNTTNPYPSGVYASSAENIARLLQDFMKDTPKALTLSSSSPVSETGPLTAAVSEEGGEGFEQSFFSFNSMDETQNLTQETSFFHDQVIKPEITMDQDHGLISQGSLSLFEKWLFDEQSHEMVGMALAGQEGMF

SEQ ID NO: 318 - DNA, 1384 bp, Arabidopsis thaliana
ttcacttgagaacaaccccctttgaactcgatcaagaaagctaagtttgaagaatcaagaatggtgcggacaccgtgttgcaaagccgaactagggttaaagaaaggagcttggactcccgaggaagatcagaagcttctctcttaccttaaccgccacggtgaaggtggatggcgaactctccccgaaaaagctggactcaagagatgcggcaaaagctgcagactgagatgggccaattatcttagacctgacatcaaaagaggagagttcactgaagacgaagaacgttcaatcatctctcttcacgcccttcacggcaacaaatggtctgctatagctcgtggactaccaggaagaaccgataacgagatcaagaactactggaacactcatatcaaaaaacgtttgatcaagaaaggtattgatccagttacacacaagggcataacctccggtaccgacaaatcagaaaacctcccggagaaacaaaatgttaatctgacaactagtgaccatgatcttgataatgacaaggcgaagaagaacaacaagaattttggattatcatcggctagtttcttgaacaaagtagctaataggttcggaaagagaatcaatcagagtgttctgtctgagattatcggaagtggaggcccacttgcttctactagtcacactactaatactacaactacaagtgtttccgttgactctgaatcagttaagtcaacgagttcttccttcgcaccaacctcgaatcttctctgccatgggaccgttgcaacaacaccagtttcatcgaactttgacgttgatggtaacgttaatctgacgtgttcttcgtccacgttctctgattcctccgttaacaatcctctaatgtactgcgataatttcgttggtaataacaacgttgatgatgaggatactatcgggttctccacatttctgaatgatgaagatttcatgatgttggaggagtcttgtgttgaaaacactgcgttcatgaaagaacttacgaggtttcttcacgaggatgaaaacgacgtcgttgatgtgacgccggtctatgaacgtcaagacttgtttgacgaaattgataactattttggatgagtgaaactcataatcgatgaatcccacgtgaccatgtcaatatgatgtctatggatatgttaccttgatgatgttgatggtaataataataaataatagatggtgatgatgaccatgcatgaatcatgaatgtagttcgtgttgtcacatatgcttgtgtttttgtgttttttttttttggtctgaagtgtgttgtttcgttgtaaatggattataaatggtgatgtaataattataatgttaaaaaaaaaaaaaaaaaaaaaaa

SEQ ID NO: 319 - protein, 352 aa, Arabidopsis thaliana
MVRTPCCKAELGLKKGAWTPEEDQKLLSYLNRHGEGGWRTLPEKAGLKRCGKSCRLRWANYLRPDIKRGEFTEDEERSIISLHALHGNKWSAIARGLPGRTDNEIKNYWNTHIKKRLIKKGIDPVTHKGITSGTDKSENLPEKQNVNLTTSDHDLDNDKAKKNNKNFGLSSASFLNKVANRFGKRINQSVLSEIIGSGGPLASTSHTTNTTTTSVSVDSESVKSTSSSFAPTSNLLCHGTVATTPVSSNFDVDGNVNLTCSSSTFSDSSVNNPLMYCDNFVGNNNVDDEDTIGFSTFLNDEDFMMLEESCVENTAFMKELTRFLHEDENDVVDVTPVYERQDLFDEIDNYFG

SEQ ID NO: 320 - DNA, 840 bp, Arabidopsis thaliana
atggggaggacgacatggttcgacgtcgacgggatgaagaaaggagagtggacggcagaggaagaccagaagctcggcgcttacatcaacgagcatggcgtttgtgattggcgttccctccccaaaagagctggtttgcagagatgtggaaagagctgcagattaaggtggcttaactatctaaagcctgggattagaagaggcaaattcactcctcaagaagaagaagaaatcatccaacttcatgctgttctcggaaacaggtgggcagccatggcgaagaagatgcagaatcgaacagacaatgatatcaagaaccattggaactcttgtctcaagaaaagactttcgagaaagggaatcgaccctatgacccacgagcccatcatcaaacacctcaccgtcaataccactaacgcagattgtggtaactcttccaccacgacgtccccgtcgacgacggaaagctctccttcctccggctcgtctcgtcttcttaacaaactcgccgcaggtatctcatctagacaacatagtctcgataggatcaagtacatcttgtcgaattcaataatcgaaagcagtgatcaagcaaaagaggaagaagaaaaagaagaagaagaagaagaaagagattcaatgatgggtcagaagattgacggtagtgaaggagaagatattcagatttggggcgaggaggaagttaggcgtttaatggagattgatgcaatggatatgtacgagatgacttcgtacgacgctgtcatgtacgagagtagtcacatacttgatcatctcttttgacttaatatagtgtgactgtgtgagtgcatgcatgtt

SEQ ID NO: 321 - protein, 267 aa, Arabidopsis thaliana
MGRTTWFDVDGMKKGEWTAEEDQKLGAYINEHGVCDWRSLPKRAGLQRCGKSCRLRWLNYLKPGIRRGKFTPQEEEEIIQLHAVLGNRWAAMAKKMQNRTDNDIKNHWNSCLKKRLSRKGIDPMTHEPIIKHLTVNTTNADCGNSSTTTSPSTTESSPSSGSSRLLNKLAAGISSRQHSLDRIKYILSNSIIESSDQAKEEEEKEEEEEERDSMMGQKIDGSEGEDIQIWGEEEVRRLMEIDAMDMYEMTSYDAVMYESSHILDHLF

SEQ ID NO: 322 - DNA, 2299 bp, Arabidopsis thaliana
  misc_feature (32)..(33): n is a, c, g, or t
  misc_feature (37)..(37): n is a, c, g, or t
  misc_feature (45)..(45): n is a, c, g, or t
  misc_feature (62)..(62): n is a, c, g, or t
  misc_feature (76)..(76): n is a, c, g, or t
  misc_feature (122)..(122): n is a, c, g, or t
  misc_feature (151)..(151): n is a, c, g, or t
aaaaaaaaaggggagagatttagttttatccnncagngcctgaantacgttctgcaatcaanacggacataaccgnccgttgtgtcctgtttataaagttttgctttttttattttctccantgatgggtcttttctttcttctctctctngtgtttctttcatggggttaagactagtgtttaccgcgtgaaggtttttttttctttctattttctttcatttcctctccttctacttcttcttctccagttctcatctgggttcttcaatggcgagtgttgaaggtgatgatgatttcggaagttcttcgtcaaggtcttatcaagatcaactatacacagagctatggaaagtttgtgcaggtccattagtggaagttcctcgtgctcaagagagagttttctacttccctcagggtcacatggaacaacttgtggcgtcaactaatcaaggaatcaattcagaagaaatacctgtttttgatcttcctccaaagatactttgtcgagttcttgatgtcactttaaaggcggagcatgaaacagatgaggtttacgctcagatcacattacaaccagaggaagatcaaagtgaaccaacaagtcttgatccacctattgttggaccaactaagcaagagtttcattcgtttgttaagattttaacggcttcagatacaagcactcatggtggattctctgttcttcgtaaacacgccactgaatgcttgccttctttggatatgacacaagctactcctactcaagaacttgtgactagagatcttcatggctttgaatggaggtttaagcatatattcagaggacaaccacggaggcatttgcttactacgggttggagtacatttgtatcctcgaaaagacttgtagctggagatgcttttgtgttcttgaggggtgagaatggggatttacgggttggagtgagacgattagctcggcatcaaagcacaatgcctacttcggttatttcaagtcagagcatgcatttgggagttcttgctacagcttctcatgctgtgcgtacaacaacaatctttgttgtcttttacaagcctaggataagccaattcatagttggggtgaacaagtatatggaagctataaagcatggattttctctcggtacccgattcagaatgaggtttgaaggagaagagtctcctgagagaatatttactggtacgattgtgggaagtggagatctatcttcacaatggccagcttctaaatggaggtcattgcaggtacaatgggatgagccaacaacagttcagagaccagataaagtctcaccatgggagatagagcctttcttggcaacttccccaatttcaactcctgctcaacaaccacaatcgaaatgcaagcggtcaagacccatcgagccatcagttaaaacaccagccccacctagtttcttgtacagcctccctcagagccaagattccattaatgcatcccttaaactgtttcaagatccatcacttgagagaatttcaggtggatactcctcaaacaacagcttcaaacccgagactcctcctcctccaacgaattgtagctataggttgtttggatttgatctcacaagcaattctcctgctccaatccctcaagacaagcaaccgatggatacttgtggagctgccaagtgtcaagaacccatcactccaacctcaatgagtgagcagaagaagcaacaaacatcaagaagtcgaactaaagtgcaaatgcaaggcattgcggttggtcgtgcggttgatttaacactgttgaaatcttacgatgaactgattgatgagcttgaggagatgtttgagattcaaggacagcttcttgcccgagacaaatggatcgttgtcttcactgatgatgaaggagatatgatgcttgctggtgatgatccgtggaatgagttttgcaagatggcaaagaagatatttatatattcgagcgatgaggttaagaaaatgacaacgaaactgaagatttcttcgtcgttagagaatgaggaatatggtaatgaatcattcgaaaatcgtagtagggggtgagagttttagctgttaattaaggttaattcggcgacgtcgttttagtgcgtaagtgtctaaagactttttttttagtctgtgtatataaagtcttgtcctctttttcatgtcaatttttcaagttggcgatttaatatttcggttttgggacagtggttgatggggcggttttacattttttatgtgtatgtacttgttccaaaaccattcaattttcaaa

SEQ ID NO: 323 - protein, 602 aa, Arabidopsis thaliana
MASVEGDDDFGSSSSRSYQDQLYTELWKVCAGPLVEVPRAQERVFYFPQGHMEQLVASTNQGINSEEIPVFDLPPKILCRVLDVTLKAEHETDEVYAQITLQPEEDQSEPTSLDPPIVGPTKQEFHSFVKILTASDTSTHGGFSVLRKHATECLPSLDMTQATPTQELVTRDLHGFEWRFKHIFRGQPRRHLLTTGWSTFVSSKRLVAGDAFVFLRGENGDLRVGVRRLARHQSTMPTSVISSQSMHLGVLATASHAVRTTTIFVVFYKPRISQFIVGVNKYMEAIKHGFSLGTRFRMRFEGEESPERIFTGTIVGSGDLSSQWPASKWRSLQVQWDEPTTVQRPDKVSPWEIEPFLATSPISTPAQQPQSKCKRSRPIEPSVKTPAPPSFLYSLPQSQDSINASLKLFQDPSLERISGGYSSNNSFKPETPPPPTNCSYRLFGFDLTSNSPAPIPQDKQPMDTCGAAKCQEPITPTSMSEQKKQQTSRSRTKVQMQGIAVGRAVDLTLLKSYDELIDELEEMFEIQGQLLARDKWIVVFTDDEGDMMLAGDDPWNEFCKMAKKIFIYSSDEVKKMTTKLKISSSLENEEYGNESFENRSRG

SEQ ID NO: 324 - DNA, 1221 bp, Arabidopsis thaliana
cctctttcagagagagaaagagagtcagagagagagagagagagaatgttccatgctaagaaaccttcaagtatgaatggttcatatgagaacagagctatgtgcgttcaaggcgattcaggccttgtcctcaccaccgaccctaaaccgcgtttgcgttggaccgtcgaactccacgagcgttttgtggacgccgtcgctcagctcggcggccccgacaaagcgaccccaaagacgattatgagagttatgggtgtgaagggtcttactctttaccacctaaagagccatcttcagaaattcaggcttggaaagcagccgcacaaggagtacggagatcactccacaaaggaaggttcaagagcttctgccatggatattcagcgcaacgtagcttcttcttctggcatgatgagtcgcaacatgaatgagatgcaaatggaagtgcagagaaggttgcatgaacagctagaggtgcaaagacatctgcaactgaggattgaagcacaaggaaagtacatgcaatctatcttggagagagcttgccaaaccctagccggtgagaacatggcagccgccaccgcagcagccgccgtcggaggaggatacaagggtaatctgggaagttcgagtctttcagcagcggtgggcccacctcctcatcctcttagtttcccgccgtttcaagacctaaacatctatggaaacacaaccgaccaagtcctcgaccatcacaacttccatcatcaaaacatagagaaccatttcacgggtaacaatgctgcagacaccaacatttacttggggaagaagcgacctaatcctaattttggtaacgatgtaaggaaaggactattgatgtggtctgatcaagatcacgatctttccgcaaaccaatcgatcgatgatgagcatagaattcagatacagatggctacacatgtctccacggatttggattctttgtcggagatctacgaaaggaaatcaggtttatcaggtgatgaagggaataatggtgggaaattactggaaaggccatcgcctaggagatcaccattgagtcctatgatgaaccctaatggtggattaatacaaggaagaaactcgccatttgggtgatacaatttattaatttttatctatgagtgatgcatgggaatgtaagaacgagatatatatgttttgtcattgtgagtttgacgtagggtttagagaaaa

SEQ ID NO: 325 - protein, 358 aa, Arabidopsis thaliana
MFHAKKPSSMNGSYENRAMCVQGDSGLVLTTDPKPRLRWTVELHERFVDAVAQLGGPDKATPKTIMRVMGVKGLTLYHLKSHLQKFRLGKQPHKEYGDHSTKEGSRASAMDIQRNVASSSGMMSRNMNEMQMEVQRRLHEQLEVQRHLQLRIEAQGKYMQSILERACQTLAGENMAAATAAAAVGGGYKGNLGSSSLSAAVGPPPHPLSFPPFQDLNIYGNTTDQVLDHHNFHHQNIENHFTGNNAADTNIYLGKKRPNPNFGNDVRKGLLMWSDQDHDLSANQSIDDEHRIQIQMATHVSTDLDSLSEIYERKSGLSGDEGNNGGKLLERPSPRRSPLSPMMNPNGGLIQGRNSPFG

SEQ ID NO: 326 - DNA, 2007 bp, Arabidopsis thaliana
cttcttctccttctctgatcgttcgttttctggacgagagagatggtaaatccgggtcacggaagaggacccgattcgggtactgctgctggtgggtcaaactccgacccgtttcctgcgaatcttcgagttcttgtcgttgatgatgatccaacttgtctcatgatcttagagaggatgcttatgacttgtctctacagagagcagagagcgcattgtctctgcttcggaagaacaaagaatggttttgatattgtcattagtgatgttcatatgcctgacatggatggtttcaagctccttgaacacgttggtttagagatggatttacctgttatcaatctgaatgttttgaaacctttggttatagtgatgtctgcggatgattcgaagagcgttgtgttgaaaggagtgactcacggtgcagttgattacctcatcaaaccggtacgtattgaggctttgaagaatatatggcaacatgtggtgcggaagaagcgtaacgagtggaatgtttctgaacattctggaggaagtattgaagatactggcggtgacagggacaggcagcagcagcatagggaggatgctgataacaactcgtcttcagttaatgaagggaacgggaggagctcgaggaagcggaaggaagaggaagtagatgatcaaggggatgataaggaagactcatcgagtttaaagaaaccacgcgtggtttggtctgttgaattgcatcagcagtttgttgctgctgtgaatcagctaggcgttgacagtgagttaaaaacttgcttgcttatgcatttgtgtgtgtcgattggtaacattgtggaattccagaagtatcggatatatctgagacggcttggaggagtatcgcaacaccaaggaaatatgaaccattcgtttatgactggtcaagatcagagttttggacctctttcttcgttgaatggatttgatcttcaatctttagctgttactggtcagctccctcctcagagccttgcacagcttcaagcagctggtcttggccggcctacactcgctaaaccagggatgtcggtttctccccttgtagatcagagaagcatcttcaactttgaaaacccaaaaataagatttggagacggacatggtcagacgatgaacaatggaaatttgcttcatggtgtcccaacgggtagtcacatgcgtctgcgtcctggacagaatgttcagagcagcggaatgatgttgccagtagcagaccagctacctcgaggaggaccatcgatgctaccatccctcgggcaacagccgatattgtcaagcagcgtttcaagaagaagcgatctcactggtgcgctggcggttagaaacagtatccccgagaccaacagcagagtgttaccaactactcactcggtcttcaataacttccccgcggatctacctcgcagcagcttcccgttggcaagtgccccagggatttcagttccagtatcagtttcttaccaagaagaggtcaacagctcggatgcaaaaggaggttcatcagctgctactgctggatttggtaacccaagctacgacatatttaacgattttccgcagcaccaacagcacaacaagaacatcagcaataaactaaacgattgggatctgcggaatatgggattggtcttcagttccaatcaggacgcagcaactgcaaccgcaaccgcagcattttccacttcggaagcatactcttcgtcttctacgcagagaaaaagacgggaaacggacgcaacagttgtgggtgagcatgggcagaacctgcagtcaccgagccggaatctgtatcatctgaaccacgtttttatggacggtggttcagtcagagtgaagtcagaaagagtggcggagacagtgacttgtcctccagcaaatacattgtttcacgagcagtataatcaagaagatctgatgagcgcatttctcaaacaggtttgattattactcgaatacagtgcactctaaaac

SEQ ID NO: 327 - protein, 644 aa, Arabidopsis thaliana
MVNPGHGRGPDSGTAAGGSNSDPFPANLRVLVVDDDPTCLMILERMLMTCLYREQRAHCLCFGRTKNGFDIVISDVHMPDMDGFKLLEHVGLEMDLPVINLNVLKPLVIVMSADDSKSVVLKGVTHGAVDYLIKPVRIEALKNIWQHVVRKKRNEWNVSEHSGGSIEDTGGDRDRQQQHREDADNNSSSVNEGNGRSSRKRKEEEVDDQGDDKEDSSSLKKPRVVWSVELHQQFVAAVNQLGVDSELKTCLLMHLCVSIGNIVEFQKYRIYLRRLGGVSQHQGNMNHSFMTGQDQSFGPLSSLNGFDLQSLAVTGQLPPQSLAQLQAAGLGRPTLAKPGMSVSPLVDQRSIFNFENPKIRFGDGHGQTMNNGNLLHGVPTGSHMRLRPGQNVQSSGMMLPVADQLPRGGPSMLPSLGQQPILSSSVSRRSDLTGALAVRNSIPETNSRVLPTTHSVFNNFPADLPRSSFPLASAPGISVPVSVSYQEEVNSSDAKGGSSAATAGFGNPSYDIFNDFPQHQQHNKNISNKLNDWDLRNMGLVFSSNQDAATATATAAFSTSEAYSSSSTQRKRRETDATVVGEHGQNLQSPSRNLYHLNHVFMDGGSVRVKSERVAETVTCPPANTLFHEQYNQEDLMSAFLKQV

SEQ ID NO: 328 - DNA, 1760 bp, Arabidopsis thaliana
aaaaaaaacaaaagaatagtcatcatcatcatcaccatcatcatccttatcatcatcaacaacttcagtggcagcaatagcaagagaaaggtttctttaattatgtctatggaaggtgtttttctagagaaaaccaaaacaaacacaacaactactctccctgatctatctctccacatcagtctcccagatattcatcaataccatcacaatgaatcttctaaagaatcttcaagaagatcctcccaactcgaaaacaacaaccgatcgtccaactttgaactctctttatctcatcataaccatccaacagcaagaatcttccattgtcctgatcgaagaacccttaatcttcctcatcagcagcattacaacaaccctatcatcaatggtgttcatcaaagggtcgatgaatccgagattagtaatctccaccgtccaattagaggcatcccggtctatcacaaccgttcattccctttccaccaacaaaactcttcattaccttctcttggaggaggagacatggatcaaatctcaatcttaaactcatcttccggctacaacaacgcttaccgatcattacaatcttccccgaggcttaaaggtgttcctttgcatcatcatcatcatcataatcagtatggagtcgttggatcttcagattcgtcttctcctcatcaccataaccatcatcatcatgggatgatcagatcaagattcttgcctaagatgccgacaaagcgaagcatgagagctccaaggatgcgttggactagtagcctccacgcgcggtttgttcacgctgttgagcttctaggcggccatgaaagagcaactccaaagtcggttcttgagctcatggatgtaaaagacttaactttagcacatgtgaagagccatttgcagatgtatcgaactgttaagaccactaacaagcctgctgcttcatcagatgggtcaggagaagaagaaatgggcataaatggaaacgaagttcatcatcaatcatcgacggatcaaagggcacaatctgatgatacttctcttcatcaagaaactgacatttcttccacacaacctcgttggagtaactcttcacgagagacatggccattaagtaataactgctcaagcgacatagatacaatgatcagaacttcatcaacatcaatgatctctcattatcaaagatccagcattcaaaatcaggagcaaaggtcgaatgatcaagcaaagaggtgtggaaatcttagttgtgaaaatccaagtttggagtttacattaggcagaccagattggcacgagaaatgactttcttgatcaatttggatttttatatatattggattttttatttttttgtttcatctttctctctctatatatactcagaaacatgtatgcagtatatatctttgtgacgatgaaattctcagcgtaaaagaaggagaacacgtagagagccaagctgctcaagagtgttgatttttgcacagagagagagaatatcactaccaaaatgaagaaatttggaggttcctcttctcaagttccattgatgatttgattataaagtggatgatcaatgtatgagtttttgtttttgggttttcgggtttttagttttttgaggttgatctggtggtgtgatcataagttatataattggaagatcatcaaaatgtggtgaaagtttggatatttttttgaaagcctcttggttggctagagggtttcaagttttttttttttttttt

SEQ ID NO: 329 - protein, 403 aa, Arabidopsis thaliana
MSMEGVFLEKTKTNTTTTLPDLSLHISLPDIHQYHHNESSKESSRRSSQLENNNRSSNFELSLSHHNHPTARIFHCPDRRTLNLPHQQHYNNPIINGVHQRVDESEISNLHRPIRGIPVYHNRSFPFHQQNSSLPSLGGGDMDQISILNSSSGYNNAYRSLQSSPRLKGVPLHHHHHHNQYGVVGSSDSSSPHHHNHHHHGMIRSRFLPKMPTKRSMRAPRMRWTSSLHARFVHAVELLGGHERATPKSVLELMDVKDLTLAHVKSHLQMYRTVKTTNKPAASSDGSGEEEMGINGNEVHHQSSTDQRAQSDDTSLHQETDISSTQPRWSNSSRETWPLSNNCSSDIDTMIRTSSTSMISHYQRSSIQNQEQRSNDQAKRCGNLSCENPSLEFTLGRPDWHEK

SEQ ID NO: 330 - DNA, 1182 bp, Arabidopsis thaliana
ctttttgaaataaataacattatacccctcctttttcccataaaattcatcaagattatctcaaaatcattcaccaattctctcttcttatggagcttttcccttcacaacctgacttgtacttgaagatcagccgaagaagagaagaagaacaagaaaaagaaagtcaagaactacaagaacaagaagtcgaaaggagattagggtttcagagtaaagcctcagatttagacaacaagtcttcaaataatctcatccacactctccagttcacttcaaacaatgaagccaccaagattaatagtaatcaagaacacaaggaatctctcgatcaagacttgagatctatttttatgatgagaccaataagaggaatccctctttaccagaatcaagtccttgaccactactactactcatctacctctcccaatcctttcttcttcagtgaagtcaacggtcaacatgctagtcgtcgcttaatcacaaaccctaattgtagttttaatctccacaaccgtcatcggcgtcaagctcaaccgcagccgccaagattcaccgccaaaagaggagtaagggctccaaggatgcggtggacgacgaccctccacgcccattttgtacacgctgttcaattattgggtggtcatgaaagagcaaccccaaaatcagtacttgagctgatggatgtgcaagatctcacattggctcatgttaaatcccatctacagatgtatcgaaccatcaagtctactgaaaaacctacaacgtcatcagggcagtcagattgtgagaatggatcacaagtaaacagtgagagagaagcaagaaatctcacgggtctatggaataactcctcaagtgaagctcggttccagttgaaggcaaaggcatcatcaggtgtagacatttcatccaatgagaatgaatggaagaatcgaagatgtccaagcaacgaacggttgtcgtcagattcgtcaagccttacagggacaagaccagagactgaaactcccaatcttgatttcactttagctacaccaaacctctctccctaattttcttatatatactaaaaatacatattatctgttaaaaattatataaatctcaaacttaaaagtttatgcttttgaaaaaatatatatgaaatgacgtttatttcttccttaaaaaaaaaaa

SEQ ID NO: 331 - protein, 322 aa, Arabidopsis thaliana
MELFPSQPDLYLKISRRREEEQEKESQELQEQEVERRLGFQSKASDLDNKSSNNLIHTLQFTSNNEATKINSNQEHKESLDQDLRSIFMMRPIRGIPLYQNQVLDHYYYSSTSPNPFFFSEVNGQHASRRLITNPNCSFNLHNRHRRQAQPQPPRFTAKRGVRAPRMRWTTTLHAHFVHAVQLLGGHERATPKSVLELMDVQDLTLAHVKSHLQMYRTIKSTEKPTTSSGQSDCENGSQVNSEREARNLTGLWNNSSSEARFQLKAKASSGVDISSNENEWKNRRCPSNERLSSDSSSLTGTRPETETPNLDFTLATPNLSP

SEQ ID NO: 332 - DNA, 834 bp, Arabidopsis thaliana
aaaaaaaccaaacataaaacataaaactctgtcctttttttgtcttcttgtaacttttcttgttaaaaatcaatggcgtcatctagcagcacataccggagctcaagctcttccgacggtggtaataataacccgtcggactccgtcgtcaccgtcgacgaacgaaaacgtaaaagaatgttatcgaacagagaatctgcacgtaggtcaaggatgcgtaaacagaaacacgttgatgatctaacggctcagatcaatcagctatcaaacgacaaccgtcagatcttgaacagcctcaccgtaacatctcagctttacatgaagatccaagccgagaactctgttctcaccgctcagatggaggagcttagcaccagactccaatctctcaacgagatcgttgatcttgttcaatccaacggtgcaggatttggtgttgaccagatcgacggctgtggttttgatgatcgtacggttgggatcgacggatattacgatgatatgaatatgatgagtaatgttaatcattggggtggttcggtttacactaaccaacccattatggctaatgatatcaatatgtattgattaataaaattaattaaaataattagatgccccttttttgtctttttattttaaaatttagcccattttggtgtttttgggttggtgtgatgatgtaattatagtacatgcatctttgattggttggaaggataaatataaactttatatatatattggggcatatatatatgagttgtactttgcatgtattggtgtgtgttttgttataattatatgattatatatgtttatgttaaaaaaaaa

SEQ ID NO: 333 - protein, 171 aa, Arabidopsis thaliana
MASSSSTYRSSSSSDGGNNNPSDSVVTVDERKRKRMLSNRESARRSRMRKQKHVDDLTAQINQLSNDNRQILNSLTVTSQLYMKIQAENSVLTAQMEELSTRLQSLNEIVDLVQSNGAGFGVDQIDGCGFDDRTVGIDGYYDDMNMMSNVNHWGGSVYTNQPIMANDINMY

SEQ ID NO: 334 - DNA, 2001 bp, Arabidopsis thaliana
tgcttaattccaatgccatcgtgatcgattcatctctctctctctcttccaattttcccaattcttttttaaaaccctaatttttcagatatctgattatctcttgtatttcttctactcgatttgctcccataaaaacccttactttcttcaagttctggttttcaccgattgatgggtcgtggctcagtgacgtcgcttgctcctgggttccgttttcacccgacggatgaggaacttgttcgctactaccttaagcgtaaggtctgcaacaaaccctttaagttcgatgctatttccgtcaccgacatatacaagtctgagccttgggatctaccagataagtcgaagctgaaaagtagagacttggaatggtacttctttagtatgctggataagaagtacagtaatggttccaagacgaatcgtgctacggagaaagggtattggaagacgactgggaaagatcgggagattcgtaatggttcaagagtcgttgggatgaagaagacacttgtttatcacaagggtcgagctcctcgtggtgaaaggaccaattgggttatgcatgagtatcggctttctgatgaggacttgaagaaagctggtgtgccacaagaagcatatgtgttatgtaggatattccagaaaagtggtacgggtcctaagaatggggagcagtatggtgctccttatcttgaggaggagtgggaagaagatggaatgacttatgtacctgctcaagatgctttcagtgaaggattggctttgaatgatgatgtttatgtcgatattgatgacattgacgagaagcccgaaaatctggtggtctatgatgccgttcctattctacctaactattgtcatggggaatcaagtaacaatgttgaatcaggcaattactcagactctggaaattacattcaaccaggaaacaatgttgtcgactctggtgggtactttgaacaaccaattgaaacttttgaggaagatcggaagcctattatacgggagggtagcattcagccttgttctctgtttccagaggaacaaattggctgtggtgtgcaagacgaaaatgtggtgaatctggaatcttccaacaataatgtgtttgtagctgatacatgctacagtgacattcctattgatcataactatttacccgatgagccattcatggatcctaataacaatcttccactcaacgatggtctgtacctggaaacgaatgatctcagctgtgctcaacaagatgattttaacttcgaagattatctcagcttctttgatgatgagggtttgacttttgacgattctctattaatgggacctgaagattttcttcccaaccaagaagcccttgaccagaaacctgcccctaaagaattggagaaggaggtcgcaggaggcaaagaggcagtggaggaaaaggaaagtggcgaaggatcttcttcaaaacaagatacagatttcaaggactttgattcagctccgaagtacccatttctcaaaaagacgagccacatgcttggagccattcctactccatcttcatttgcttcacagttccaaacaaaggacgcaatgcgtctacacgcagcacaatcttctggttcagttcacgtgactgcaggtatgatgagaatatcaaacatgactctagcagcggacagcggtatgggctggtcatatgacaagaacggtaacctcaacgtagtcctttcattcggggtagtccaacaggatgatgcgatgactgcctcgggaagcaagacaggaattacggcgacaagagctatgttagtcttcatgtgtttatgggttctcctactctctgttagcttcaaaatagtaaccatggtgtctgctcggtaataggatcaaagttgaatcgtctcaaagactttttttggtgtttgtacctctccaatcatatagcctttaactttggcagtgctttgctgctcaatatttaaattttaaaaaaaaaaaaaaaaa

SEQ ID NO: 335 - protein, 567 aa, Arabidopsis thaliana
MGRGSVTSLAPGFRFHPTDEELVRYYLKRKVCNKPFKFDAISVTDIYKSEPWDLPDKSKLKSRDLEWYFFSMLDKKYSNGSKTNRATEKGYWKTTGKDREIRNGSRVVGMKKTLVYHKGRAPRGERTNWVMHEYRLSDEDLKKAGVPQEAYVLCRIFQKSGTGPKNGEQYGAPYLEEEWEEDGMTYVPAQDAFSEGLALNDDVYVDIDDIDEKPENLVVYDAVPILPNYCHGESSNNVESGNYSDSGNYIQPGNNVVDSGGYFEQPIETFEEDRKPIIREGSIQPCSLFPEEQIGCGVQDENVVNLESSNNNVFVADTCYSDIPIDHNYLPDEPFMDPNNNLPLNDGLYLETNDLSCAQQDDFNFEDYLSFFDDEGLTFDDSLLMGPEDFLPNQEALDQKPAPKELEKEVAGGKEAVEEKESGEGSSSKQDTDFKDFDSAPKYPFLKKTSHMLGAIPTPSSFASQFQTKDAMRLHAAQSSGSVHVTAGMMRISNMTLAADSGMGWSYDKNGNLNVVLSFGVVQQDDAMTASGSKTGITATRAMLVFMCLWVLLLSVSFKIVTMVSAR

SEQ ID NO: 336 - DNA, 1824 bp, Arabidopsis thaliana
ggggccgaccggccgcccgggcaggtctaggttcaaaaggactcacaagagagagatagtatgattgatagggaaagagagagagatgaaagaaagtaaaatatataatagattattaggacacgagtgtcatcttttgatttgtgtcttgtgtgctctctctttcttctcttcctcgaatgatcatctttatataaccctactctctttctcttttcccattctttcatatcattctccctttctctctcgggatctgatctctctttccagtaacctattcccgaggagcactgtcaaatcttgtccactctttgatcttatctcgatctctttctctttctagtcttgtgtagtcttcaaacttgtgatgttatctatatagtaatcacgagagagaatcatacaatagctgaaacataaagctttcttagaagctttaaaaaggtctcatctggattatcctgtttaatttctagagtttcttcaggcagattattaaccgatcaagaagacaaacatgaattcattttcccacgtccctccgggttttagatttcacccgacagatgaagaacttgtagactactacctgaggaaaaaagtcgcatcgaagagaatagaaattgatttcataaaggacattgatctttacaagattgagccatgggaccttcaagagttgtgcaaaattgggcatgaagagcagagtgattggtacttctttagccataaagacaagaagtatcccacagggactcgaaccaatagagcaacaaaagcagggttttggaaagccaccggaagagataaggctatctatttgaggcatagtctaattggcatgaggaaaacacttgtgttttacaagggaagagccccaaatggacaaaagtctgattggatcatgcacgaataccgcttagaaaccgatgaaaacggaactcctcaggaagaaggatgggttgtgtgtagggttttcaagaagagattggctgcagttagacgaatgggagattacgactcatccccttcacattggtacgatgatcaactttcttttatggcctccgagctcgagacaaacggtcaacgacggattctccccaatcatcatcagcagcagcagcacgagcaccaacaacatatgccatatggcctcaatgcatctgcttacgctctcaacaaccctaacttgcaatgcaagcaagagctagaactacactacaaccacctgcaatcaaatatcgcgcatgaggaacaattgaatcaaggaaatcagaacttcagctctctatacatgaacagcggcaacgagcaagtgatggaccaagtcacagactggagagttctcgataaatttgttgcttctcagctaagcaacgaggaggctgccacagcttctgcatctatacagaataatgccaaggacacaagcaatgctgagtaccaagttgatgaagaaaaagatccgaaaagggcttcagacatgggagaagaatatactgcttctacttcttcgagttgtcagattgatctatggaagtgagctgaaagagaagacatataaatgcatatatacatatatatatatacgtacacacgaacactaatcaagtgtagatgatgatgatggtacagatttatatttgctttgattgattcttactacattattgaacttatgtcatatgcatatatacattgcgtatctatgcatatttatacttgtactcaatatgattaaccatatataaactctaatctaaatgtaactccaatattttttaaatagacaattgtctcttcttattagaaaaaaaa

SEQ ID NO: 337 - protein, 342 aa, Arabidopsis thaliana
MNSFSHVPPGFRFHPTDEELVDYYLRKKVASKRIEIDFIKDIDLYKIEPWDLQELCKIGHEEQSDWYFFSHKDKKYPTGTRTNRATKAGFWKATGRDKAIYLRHSLIGMRKTLVFYKGRAPNGQKSDWIMHEYRLETDENGTPQEEGWVVCRVFKKRLAAVRRMGDYDSSPSHWYDDQLSFMASELETNGQRRILPNHHQQQQHEHQQHMPYGLNASAYALNNPNLQCKQELELHYNHLQSNIAHEEQLNQGNQNFSSLYMNSGNEQVMDQVTDWRVLDKFVASQLSNEEAATASASIQNNAKDTSNAEYQVDEEKDPKRASDMGEEYTASTSSSCQIDLWK

SEQ ID NO: 338 - DNA, 1065 bp, Arabidopsis thaliana
ggttcttggatttggagtaaactaaagatcatataaaatggaacaaggagatcatcagcagcataagaaagaagaagaagctttgccaccgggtttcagatttcatccgacggatgaggagctaatctcatattacttggttaataagattgccgatcaaaacttcaccgggaaagcaatcgctgacgttgatcttaacaagtccgagccatgggagcttcctgagaaggcgaaaatgggaggaaaagaatggtacttttttagcctccgggaccggaagtacccgacgggagtgaggacgaatagggcgacgaatacaggatattggaaaaccacaggaaaagacaaagagatattcaatagcacaacctcggagttggtcgggatgaagaagactttggtcttttacagaggacgagctcctcgtggggagaagacttgttgggtcatgcatgagtatcgacttcactccaagtcctcatatagaacctccaagcaagacgagtgggtagtgtgtagagtgttcaagaaaacagaagcaaccaagaaatacataagcaccagtagcagcagcacaagtcatcaccacaacaaccacacaagagcctcaatactatcaaccaacaacaataatcctaattactcatcagacctccttcaactcccaccgcatctacaaccacacccgagcctcaatattaaccaatccctcatggcaaacgccgttcacctagctgagctctcaagagtcttccgtgcctctacaagcaccaccatggactcttctcatcagcagctaatgaactacacccacatgcctgtctcagggctcaacctcaaccttggcggtgcactggtccagccgcctcctgttgtgtctcttgaggatgttgccgcggttagtgcttcgtacaatggcgaaaacgggtttggaaatgtggagatgagccagtgcatggacttggatggatactggccatcttattgattggtaattgtcagtttaagttatggtttttatattgtttccatttacttgttggtaaaacgattttggttgttctt

SEQ ID NO: 339 - protein, 316 aa, Arabidopsis thaliana
MEQGDHQQHKKEEEALPPGFRFHPTDEELISYYLVNKIADQNFTGKAIADVDLNKSEPWELPEKAKMGGKEWYFFSLRDRKYPTGVRTNRATNTGYWKTTGKDKEIFNSTTSELVGMKKTLVFYRGRAPRGEKTCWVMHEYRLHSKSSYRTSKQDEWVVCRVFKKTEATKKYISTSSSSTSHHHNNHTRASILSTNNNNPNYSSDLLQLPPHLQPHPSLNINQSLMANAVHLAELSRVFRASTSTTMDSSHQQLMNYTHMPVSGLNLNLGGALVQPPPVVSLEDVAAVSASYNGENGFGNVEMSQCMDLDGYWPSY

SEQ ID NO: 340 - DNA, 766 bp, Arabidopsis thaliana
gacatgcatgtaagcattcggttaattaatcgagtcaaagatatatatcagtaaatacatatgtgtatatttctggaaaaagaatatatatattgagaaataagaaaagatgaaaatggaaaatggtatgtataaaaagaaaggagtgtgcgactcttgtgtctcgtccaaaagcagatccaaccacagccccaaaagaagcatgatggagcctcagcctcaccatctcctcatggattggaacaaagctaatgatcttctcacacaagaacacgcagcttttctcaatgatcctcaccatctcatgttagatccacctcccgaaaccctaattcacttggacgaagacgaagagtacgatgaagacatggatgcgatgaaggagatgcagtacatgatcgccgtcatgcagcccgtagacatcgaccctgccacggtccctaagccgaaccgccgtaacgtaaggataagcgacgatcctcagacggtggttgctcgtcggcgtcgggaaaggatcagcgagaagatccgaattctcaagaggatcgtgcctggtggtgcgaagatggacacagcttccatgctcgacgaagccatacgttacaccaagttcttgaaacggcaggtgaggattcttcagcctcactctcagattggagctcctatggctaacccctcttacctttgttattaccacaactcccaaccctgatgaactacacagaagctcgctagctagacatttggtgtcatcctctcaaccttt

SEQ ID NO: 341 - protein, 200 aa, Arabidopsis thaliana
MKMENGMYKKKGVCDSCVSSKSRSNHSPKRSMMEPQPHHLLMDWNKANDLLTQEHAAFLNDPHHLMLDPPPETLIHLDEDEEYDEDMDAMKEMQYMIAVMQPVDIDPATVPKPNRRNVRISDDPQTVVARRRRERISEKIRILKRIVPGGAKMDTASMLDEAIRYTKFLKRQVRILQPHSQIGAPMANPSYLCYYHNSQP

SEQ ID NO: 342 - DNA, 923 bp, Arabidopsis thaliana
gcatcacttcccttaaagcttcaaccttctccgatatgccgacgtcgactccggtgaaccacggcgaatagctatgaaacctaacggcgtaacagttccgatttctgaccagcaagaacagcttccatgtcctcgttgtgactcatccaacactaagttctgttactacaacaactacaacttctctcagcctcgtcacttctgcaaagcttgtcgtcgttactggactcacggtggtactctccgtgacgttcctgtcggtggtggtactcgtaaaagcgcgaaacgttcccgcacttgctcgaactcttcttcctcctctgtttctggtgtcgtctctaactctaacggtgttccgttacaaacgacgcctgttctcttccctcagtcgtcaatctctaacggcgttactcacacagtaactgaaagcgacggaaagggaagtgctttatctctctgtggaagtttcacctccactctgttgaaccataacgctcgtgcgacggctacgcatggatccggttcggttattggtatcggaggttttggaatcggactcgggtcgggttttgatgacgtcagctttggactcggaagagcgatgtggccgttttcaactgttggtactgcgacaacgacgaatgttgggagtaacggtggtcatcacgctgttccaatgccagccacgtggcagttcgagggtttagagagcaacgctggtggtggatttgtctccggtgagtactttgcgtggccggatctttccatcacaactccgggaaactcactcaaatgagaaaagcttctgtcttcatcaaagggcttcaaagtctcttcctttttttagtctctattggtgatgttgatctcttagtttgtgtcttgtcaatttagaaacttgtcttcggaaactagaaaacaga

SEQ ID NO: 343 - protein, 240 aa, Arabidopsis thaliana
MKPNGVTVPISDQQEQLPCPRCDSSNTKFCYYNNYNFSQPRHFCKACRRYWTHGGTLRDVPVGGGTRKSAKRSRTCSNSSSSSVSGVVSNSNGVPLQTTPVLFPQSSISNGVTHTVTESDGKGSALSLCGSFTSTLLNHNARATATHGSGSVIGIGGFGIGLGSGFDDVSFGLGRAMWPFSTVGTATTTNVGSNGGHHAVPMPATWQFEGLESNAGGGFVSGEYFAWPDLSITTPGNSLK

SEQ ID NO: 344 - DNA, 2079 bp, Arabidopsis thaliana
ttctttcatcgttgtgtctattataaatatatgtcaatttggtttctaaaaaattctaccattgattgattgatttttttttctttaagagatgaatttatttacaagaatctcatctcggactaagaaggccaatctttactacgtaaccctagttgctcttctctgcatcgctagctaccttctcggtatttggcaaaacacggcggttaatccacgcgccgccttcgatgattcagacggtacaccgtgcgagggattcaccagacctaattctacgaaagatctcgacttcgacgcgcatcacaacattcaagatccacctccggtgacggaaaccgccgttagtttcccgtcgtgtgccgccgcgttgagcgagcacacgccatgcgaagacgcgaagcgatcgttgaaattctcgagggagagattggagtataggcaaaggcattgtcccgagagagaagaaatcttgaagtgcagaattccggcgccgtacggttacaaaacgccgttccgatggccggcgagtcgtgacgtggcgtggttcgctaatgtgcctcacacggagcttacggttgagaaaaagaatcagaattgggtccggtacgagaatgatcggttttggttccctggtggaggtacgatgtttccacgtggcgctgatgcttacattgatgatatcggacggttgattgatctcagcgacggctctatccgtacagccatcgataccggttgcggggtggctagcttcggtgcatatcttttatcaagaaacattacaacgatgtcatttgcaccaagagacacacacgaagctcaagtccagttcgcactcgagcgtggtgtgccggcgatgatcggaatcatggctacaatccgcctaccgtacccttctagagcctttgatttagcacattgctctcgttgccttattccgtggggccaaaacgatggggcttacttgatggaggtggatagggttttaagaccaggagggtactggatactttctggaccgccgattaattggcagaaacggtggaaagggtgggaacggaccatggatgatttgaatgcagagcagactcagatcgagcaggtcgcgagaagcttgtgttggaagaaagttgttcaaagagatgatcttgctatttggcaaaaaccctttaaccacattgactgtaagaaaaccagagaggttttgaaaaatccggagttttgtcgtcatgatcaagatcccgacatggcctggtatacgaagatggattcttgtttgacaccattacctgaagttgatgacgctgaggatctaaagacggtggccggagggaaggtagaaaagtggccggctagattaaacgcgattcctccgagagtaaacaaaggcgctctcgaggaaatcacacctgaagctttcttggagaacacgaaactgtggaaacagagagtttcttattacaagaagttagattaccagttgggtgaaaccgggagatacagaaacttagtcgacatgaacgcttacctcggtggattcgcggcggctctagcggatgatccggtctgggtcatgaacgttgtcccggtcgaggctaagctcaatacgctcggtgtcatctacgagcgtggtctaatcggaacgtatcaaaactggtgtgaagccatgtcgacgtatccaagaacgtatgattttatccatgctgactcggttttcacattgtaccaaggtcaatgtgaaccggaggagatattgttggagatggaccgaattcttagaccgggtggtggtgtgattataagagatgacgtggacgttttgatcaaggttaaggaattaaccaaaggattagaatgggaaggtagaattgctgaccacgagaagggtcctcatgaaagagagaagatttactatgcggtgaaacagtattggaccgttcctgcgcctgatgaagataaaaacaacactagtgctctctcctgatttttgagttttttttttcttacaatgttttttttttttttttttcaattttttatacaacaataaattctcaataattgttgtcgcggccg

SEQ ID NO: 345 - protein, 631 aa, Arabidopsis thaliana
MNLFTRISSRTKKANLYYVTLVALLCIASYLLGIWQNTAVNPRAAFDDSDGTPCEGFTRPNSTKDLDFDAHHNIQDPPPVTETAVSFPSCAAALSEHTPCEDAKRSLKFSRERLEYRQRHCPEREEILKCRIPAPYGYKTPFRWPASRDVAWFANVPHTELTVEKKNQNWVRYENDRFWFPGGGTMFPRGADAYIDDIGRLIDLSDGSIRTAIDTGCGVASFGAYLLSRNITTMSFAPRDTHEAQVQFALERGVPAMIGIMATIRLPYPSRAFDLAHCSRCLIPWGQNDGAYLMEVDRVLRPGGYWILSGPPINWQKRWKGWERTMDDLNAEQTQIEQVARSLCWKKVVQRDDLAIWQKPFNHIDCKKTREVLKNPEFCRHDQDPDMAWYTKMDSCLTPLPEVDDAEDLKTVAGGKVEKWPARLNAIPPRVNKGALEEITPEAFLENTKLWKQRVSYYKKLDYQLGETGRYRNLVDMNAYLGGFAAALADDPVWVMNVVPVEAKLNTLGVIYERGLIGTYQNWCEAMSTYPRTYDFIHADSVFTLYQGQCEPEEILLEMDRILRPGGGVIIRDDVDVLIKVKELTKGLEWEGRIADHEKGPHEREKIYYAVKQYWTVPAPDEDKNNTSALS

SEQ ID NO: 346 - DNA, 1977 bp, Arabidopsis thaliana
atgttggcaggttgttcgagttcatcattgttgtcgcctactcgaagattgaggagtgaagcagtagcagcaacatcagcaacagtatcagcgcattttcccatgaacacacagagattggacttaccatgcagtagtagcttctctcgcaaggaaactccttctagcagaccacttggaagaagcatctctcttgacaacagcaacaacaacaacaacaaaccgatcgagcgcaagacgaagaccagtggttgttcgcttaaacagaacataaagcttccacctttggcaacaacaagaggaaatggagaagggttttcttggaacaacgacaacaacaacagagggaagagtttgaagagattagctgaggaggacgagtcttgtttgagcagagcgaagaggacaaaatgcgaaaacgaaggtggtttctggtttgagcatttcactggccaggattcttcttcaccagcattacctttttctttgacttgttcaggtgatgatgaggaaaaggtttgctttgtgccaagtgaagtcatttctcagcctttaccaaactgggttgattcggtgattacggagctagctggtataggcgataaggacgttgagagtagccttcctgcagcagttaaggaagcatctggaggatcatctacaagcgcatcatccgagagtcgtagcttaagccatagagtaccagaacctacaaatggctcaaggaatccgtactcacaccgcggtgcaacagaggaaaggaccaccggaaacatcaacaacaacaacaacaggaacgatttgcagagggatttcgagcttgtcaatttgcttacgggatgcttagacgcgatcagatcaagaaacatagcagcgattaaccatttcattgcaagaaccggtgatcttgcttctcctagaggaagaacaccaatgactcgcctcatagcttactacattgaagctttggctctaagagtggcgcgtatgtggcctcacatcttccacatcgcaccccctcgtgaattcgatagaactgtcgaagatgaatcaggaaatgcattgaggttcttgaatcaagtaaccccaattccaaagttcattcatttcacagccaacgagatgttactcagagcatttgaagggaaagagagagttcacattattgacttcgacatcaagcaaggtttacagtggcctagcttcttccaaagcttagcttcgagaataaatccaccacaccatgtacgaatcactgggatcggagaatcgaaacttgagctaaacgaaaccggagatcgcctccacggatttgcagaggcgatgaatcttcaattcgagtttcatcctgtagttgatagactcgaagacgttagactatggatgcttcacgtcaaagaaggtgaatcagtagctgtaaactgtgtcatgcagatgcacaagacactctacgatggaaccggagcagcaattagggattttttgggtttaatcagaagcacaaacccaatagctctcgttcttgcggagcaagaagcagaacacaactcagagcaacttgagacacgagtttgtaactcgctaaagtactattcagctatgtttgatgcaattcacacgaatcttgctacagatagcttaatgagagtcaaagttgaggagatgttgtttgggagagagatcaggaacattgttgcgtgtgaaggaagtcatagacaagagaggcatgtgggttttcgtcattggaggaggatgttggagcagttagggtttcggagtcttggagtctcggagagagaggttttgcagagtaagatgttgcttaggatgtacggatctgataatgaagggtttttcaatgtggagaggagcgatgaagacaacggcggtgaaggcggacgcggcggtggagttactttacggtggtcggagcagccactttatacgatctcggcttggactaccggagggaattaa

SEQ ID NO: 347 - protein, 658 aa, Arabidopsis thaliana
MLAGCSSSSLLSPTRRLRSEAVAATSATVSAHFPMNTQRLDLPCSSSFSRKETPSSRPLGRSISLDNSNNNNNKPIERKTKTSGCSLKQNIKLPPLATTRGNGEGFSWNNDNNNRGKSLKRLAEEDESCLSRAKRTKCENEGGFWFEHFTGQDSSSPALPFSLTCSGDDEEKVCFVPSEVISQPLPNWVDSVITELAGIGDKDVESSLPAAVKEASGGSSTSASSESRSLSHRVPEPTNGSRNPYSHRGATEERTTGNINNNNNRNDLQRDFELVNLLTGCLDAIRSRNIAAINHFIARTGDLASPRGRTPMTRLIAYYIEALALRVARMWPHIFHIAPPREFDRTVEDESGNALRFLNQVTPIPKFIHFTANEMLLRAFEGKERVHIIDFDIKQGLQWPSFFQSLASRINPPHHVRITGIGESKLELNETGDRLHGFAEAMNLQFEFHPVVDRLEDVRLWMLHVKEGESVAVNCVMQMHKTLYDGTGAAIRDFLGLIRSTNPIALVLAEQEAEHNSEQLETRVCNSLKYYSAMFDAIHTNLATDSLMRVKVEEMLFGREIRNIVACEGSHRQERHVGFRHWRRMLEQLGFRSLGVSEREVLQSKMLLRMYGSDNEGFFNVERSDEDNGGEGGRGGGVTLRWSEQPLYTISAWTTGGN

SEQ ID NO: 348 - DNA, 1130 bp, Arabidopsis thaliana
cataatctcttctctctatatctcttctcttcttcttttaccctgttttttttttcattccacagagcccaggttgattgattttgttattcagagatatggggagaggaaggattgagattaagaagattgagaatatcaacagtcgtcaagtcactttctctaagagacgaaacggtttgatcaagaaggctaaagagctttcgattctctgtgacgccgaggttgctcttatcatcttctccagcaccggcaagatttacgatttctccagcgtctgtatggagcaaattctttctagatatggatacactactgcgtccactgagcataaacaacaaagagaacaccaacttctaatttgtgcttcacatggaaatgaagctgtgttgcgaaatgatgattctatgaagggggaacttgaaagattacagcttgcaattgagagacttaagggtaaggagcttgaaggtatgagtttcccggatcttatttctcttgaaaaccagttgaacgagagcttgcatagtgtcaaggatcaaaagacacaaatcctgctcaaccagattgagagatccaggatacaggagaaaaaagcattggaagaaaaccaaatcttgcgcaaacaggttgagatgttggggagaggttcaggaccaaaagtgttgaatgaaaggcctcaagattctagcccagaagccgatcccgagagctcttcatcagaagaggatgagaatgacaacgaggagcaccattccgacacttccttgcagttggggttgtcgtcgacggggtattgcacaaagagaaagaagccgaagatcgaactggtctgcgataactctgggagtcaagtggcttctgattgatggaatcgattatttttctaattctggttgtttaggggtctctatgtgtcttcttgtttctggctgttcttttgctttatttcatctcaagtagagttttcttaatgtttaggtggaacatttttccataatcaagaagggatttgatcaatcaataacattagattttcttagttaaagacttaaagttgcccacacaccacaccatatgtgattatgatgaatttacattttataaaaaaaaaaaaaaaaaaaaaaaaa

SEQ ID NO: 349 - protein, 256 aa, Arabidopsis thaliana
MGRGRIEIKKIENINSRQVTFSKRRNGLIKKAKELSILCDAEVALIIFSSTGKIYDFSSVCMEQILSRYGYTTASTEHKQQREHQLLICASHGNEAVLRNDDSMKGELERLQLAIERLKGKELEGMSFPDLISLENQLNESLHSVKDQKTQILLNQIERSRIQEKKALEENQILRKQVEMLGRGSGPKVLNERPQDSSPEADPESSSSEEDENDNEEHHSDTSLQLGLSSTGYCTKRKKPKIELVCDNSGSQVASD

SEQ ID NO: 350 - DNA, 1747 bp, Arabidopsis thaliana
tgcaaaaacattttcttgtctctcctctgcccaaattttttttctttccaggaatatttcctagaaaaacccaagcaaagctttaaccccttcctcctccaaaagtagcatcttcctctttttctatttctcctttcctcttcttatctctctctcgtttgtgaacgattccttaagaatataaccaaaagcccttttctcctttcttcaactttccgggaaaaatcttcacgcagcaaggtttctctctcggctctcgcagtgtttttcgggccttttgttctttctataaaaaaaaaattcgcgtcctttaagaaaactttttccacctagagaagaagaagagtatcactcttgttgttcaagtttctctctttaataaaaaatccatctttattctttgtcttctttcctttttgctttccctaatctctatgttataaacacacagagagaaacaaagtcacagtctcgagtcaaaaacagagaatacgaaagaaaaatggaagcggagaagaaaatggttctaccgagaatcaaattcacagagcacaaaaccaacacgacaacaatcgtatcggagttaaccaacactcaccaaaccaggattcttcgtatctcagtcactgacccagacgctactgattcctccagtgacgacgaagaagaagaacatcaacgctttgtctctaaacgccgtcgtgttaagaagtttgtcaacgaagtctatctcgattccggtgctgttgttactggtagttgtggtcaaatggagtcgaagaagagacaaaagagagcggttaaatcggagtctactgtttctccggttgtttcagcgacgacgactacgacgggagagaagaagttccgaggagtgagacagcgtccatggggaaaatgggcggcggagataagagatccgttgaaacgtgtacggctctggttaggtacttacaacacggcggaagaagctgctatggtttacgataacgccgctattcagcttcgtggtcccgacgctctgactaatttctcagtcactccgacaacagcgacggagaagaaagccccaccaccgtctccggtgaagaagaagaagaagaaaaacaacaaaagcaaaaaatccgttactgcttcttcctccatcagcagaagcagcagcaacgattgtctctgctctccggtgtctgttctccgatctcctttcgccgtcgacgaattctccggcatttcttcatcaccagtcgcggccgttgtagtcaaggaagagccatccatgacaacggtatctgaaactttctctgatttctcggcgcccttgttctcagatgatgacgtgttcgatttccggagctcagtggttcccgactatctcggcggcgatttatttggggaagatctattcacggcggatatgtgtacggatatgaacttcggattcgatttcggatccggattatccagctggcacatggaggaccattttcaagatatcggggatctattcgggtcggatcctcttttagctgtttaataatattttaaataaataaatagttataccggccgttactaaacggaaccggagaaagttttgtataccggtgacataaaatctcggttatgttcgtaatctttttttctttgttatatataaaaatatgaatgaaactgaattaatgtaagttaatggtgataattattaacgttttaagttttgaaaaaaaaaaaaaaaaaaaaaaaaaaa

SEQ ID NO: 351 - protein, 343 aa, Arabidopsis thaliana
MEAEKKMVLPRIKFTEHKTNTTTIVSELTNTHQTRILRISVTDPDATDSSSDDEEEEHQRFVSKRRRVKKFVNEVYLDSGAVVTGSCGQMESKKRQKRAVKSESTVSPVVSATTTTTGEKKFRGVRQRPWGKWAAEIRDPLKRVRLWLGTYNTAEEAAMVYDNAAIQLRGPDALTNFSVTPTTATEKKAPPPSPVKKKKKKNNKSKKSVTASSSISRSSSNDCLCSPVSVLRSPFAVDEFSGISSSPVAAVVVKEEPSMTTVSETFSDFSAPLFSDDDVFDFRSSVVPDYLGGDLFGEDLFTADMCTDMNFGFDFGSGLSSWHMEDHFQDIGDLFGSDPLLAV

SEQ ID NO: 352 - DNA, 1571 bp, Arabidopsis thaliana
aggaacagtgaaaggttcggttttttgggtttcgatctgataatcaacaagaaaaaagggtttgatttatgtcggctgggtttgaatcgactgtgattttgtctttgattcatatctcttctccgatttcatcatcatcttccccatcatcgtcgtctttgaaatcttgtcttctcaacgctcttcacttctgctgtaataagcagaggcttgttctggagactccttctctttccatgcgcttaagacccaaaaggacttgttctagtgttgaagtctttgggggttttcacataaagcagcaaaagttttcttttttcatagttcgctgagagttttgagttttgataccaaaaaagttttgaccttttagagtgattttttgttctttctgttttctgggtatttttgaggagtgggtttaacaatggttgcgattagaaaggaacagtctttgagtggtgttagtagcgagattaagaagagagctaagagaaacactctatcgtcccttcctcaagaaacccaacctttgaggaaagtccgtattattgtgaatgatccttatgctactgatgattcctctagtgatgaggaagagcttaaggttcctaagccaaggaaaatgaaacgtatcgttcgtgagattaactttccttctatggaagtttctgaacagccttctgagagttcttctcaggacagtactaaaactgatggcaagatagctgtgtcagcttctcctgctgttcctaggaagaagcctgttggtgttaggcaaaggaaatgggggaaatgggctgctgagattagagatcctattaagaaaactaggacttggttgggtacttttgatactcttgaagaagctgctaaagcttatgatgctaagaagcttgagtttgatgctattgttgctggaaatgtgtccactactaaacgtgatgtttcttcatctgagactagccaatgctctcgttcttcacctgttgttcctgttgagcaagatgacacttctgcatcagctctcacttgtgtcaacaaccctgatgacgtctcgaccgttgctccaactgctccaactccaaatgttcctgctggtggaaacaaggaaacgttgttcgatttcgactttactaatctacagatccctgattttggtttcttggcagaggagcaacaagacctagacttcgattgtttcctcgcggatgatcagtttgatgatttcggcttgcttgatgacattcaaggattcgaagataacggtccaagtgcgttaccagatttcgactttgcggatgttgaagatcttcagctagctgactctagtttcggtttccttgatcaacttgctcctatcaacatctcttgcccattaaaaagttttgcagcttcataggatcttgcttagtaatgttaagtgagaagagtgttttgttttttcgtttatgctttagtaatttaagacatacaaaagtgtgtgttccggattgtagtaagatcttaagacataaagccgggttttgcaattaggaatcgagttttaatgaagttttagtttatgtttg

SEQ ID NO: 353 - protein, 324 aa, Arabidopsis thaliana
MVAIRKEQSLSGVSSEIKKRAKRNTLSSLPQETQPLRKVRIIVNDPYATDDSSSDEEELKVPKPRKMKRIVREINFPSMEVSEQPSESSSQDSTKTDGKIAVSASPAVPRKKPVGVRQRKWGKWAAEIRDPIKKTRTWLGTFDTLEEAAKAYDAKKLEFDAIVAGNVSTTKRDVSSSETSQCSRSSPVVPVEQDDTSASALTCVNNPDDVSTVAPTAPTPNVPAGGNKETLFDFDFTNLQIPDFGFLAEEQQDLDFDCFLADDQFDDFGLLDDIQGFEDNGPSALPDFDFADVEDLQLADSSFGFLDQLAPINISCPLKSFAAS

SEQ ID NO: 354 - DNA, 1083 bp, Arabidopsis thaliana
gaaaaaaagattcaaaaaccctagatttcacaaaatcgattggctgtcaaatttctctccggcgattttcctcgagtgaaattcggctcaaggtgattatagcgatcatcgaatcaaattgattgaagaggtacaaaggttagttactttgagctgaaagatgaacacgtcagaggtgagagtacctcgaggaaatcgacggaggaaagctgtgattgatctgaatgcggtacctgttgatcaagaagggacctctgcttctgttagaactcttacggtgcctattacaccgtctcagcctgctcctacgatgattgatgtcgatgctattgaggatgatgttattgaatcatccgctagtgcttttgctgaagctaaaagcaaatcaagaaatgcacgtcggagacctttgatggttgatgtagagtcaggaggtacgactagattccctgccaacataagcaacaaacgcagaaggattccttctagtgaatctgtcatcgactgtgagcatgcctctgtaaatgatgaagtcaacatgtcttcgagagtgtctagatcaaaggctccagctcctccaccagaagagccaaagtttacatgtccaatctgcatgtgtccctttacggaggagatgtcaaccaagtgcggtcacatcttctgcaagggatgtataaagatggcaatatctcgccagggcaaatgccctacttgtaggaaaaaggttactgcaaaagagctgattcgagttttccttccaaccactagatgagtggtccggcaacatcaccagccaccctgtctaatggtttatcagactatcctcctattcactttggaacattgaagggacttcgttgacttggtatttttgaatattttgctttgttggaagagaaatattcagtgatcaagaagccagaaggccctatcattcgatggatatcattggtaataactctttgtttttagttgttgttctatgtaatttaggtctctgcaaacctctcagtcgatactcttctctcttgatagatgataagatatatggaaaaaaaaattaatattgaatctttactaaaa

SEQ ID NO: 355 - protein, 203 aa, Arabidopsis thaliana
MNTSEVRVPRGNRRRKAVIDLNAVPVDQEGTSASVRTLTVPITPSQPAPTMIDVDAIEDDVIESSASAFAEAKSKSRNARRRPLMVDVESGGTTRFPANISNKRRRIPSSESVIDCEHASVNDEVNMSSRVSRSKAPAPPPEEPKFTCPICMCPFTEEMSTKCGHIFCKGCIKMAISRQGKCPTCRKKVTAKELIRVFLPTTR

SEQ ID NO: 356 - DNA, 1005 bp, Arabidopsis thaliana
atggaatctctcatcaatcccagccatggcggaggaaactacgattctcactcttcttctctcgatagtctcaaaccaagcgtactagtcatcattctcattctcctcatgactcttctcatctccgtttccatttgcttcctcctccgctgtctcaatcgctgtagccaccgctccgttctccctctttcatcttcctcttccgtcgcaaccgtaacttccgattcccgacgattctctggacatcgagtctctcccgaaacagaacggtcctccgtgcttgattcgcttccgattttcaaattctcctccgtcactcgccgatctagctccatgaattccggagattgcgccgtttgtttgtcgaaattcgaaccggaggatcagctccgtcttcttcctctctgttgtcacgcttttcacgccgattgtatcgatatctggctagtctctaaccagacttgtcctctctgtcgctctcctctcttcgcttcagaatctgatctcatgaagtctctcgccgtcgtcggctcaaacaacggcggaggagaaaacagcttccgtctcgaaatcggatccatcagccgtcgtcgtcaaacaccgattccagaatccgttgagcagcatcgaacttactcaatcggttcgttcgattacatagtagacgacgtagattcagaaatctcagagtcaaatttcaaccgtggaaaacaggaagacgcgactacaacaactgccacagcaacggcggttacgactaatccgacgtcgtttgaagctagtttagcggcggatataggtaacgatggttctagaagctggctcaaggattacgttgacagactctcacgaggtatatcgtcgcgtgcaatgtcgtttagaagctctggtagattttttactgggagtagtcgtcggagtgaggaattgacggtgatggatttagaagcgaatcatgccggagaagagataagtgagcttttccggtggctctcaggggtgtga

SEQ ID NO: 357 - protein, 334 aa, Arabidopsis thaliana
MESLINPSHGGGNYDSHSSSLDSLKPSVLVIILILLMTLLISVSICFLLRCLNRCSHRSVLPLSSSSSVATVTSDSRRFSGHRVSPETERSSVLDSLPIFKFSSVTRRSSSMNSGDCAVCLSKFEPEDQLRLLPLCCHAFHADCIDIWLVSNQTCPLCRSPLFASESDLMKSLAVVGSNNGGGENSFRLEIGSISRRRQTPIPESVEQHRTYSIGSFDYIVDDVDSEISESNFNRGKQEDATTTTATATAVTTNPTSFEASLAADIGNDGSRSWLKDYVDRLSRGISSRAMSFRSSGRFFTGSSRRSEELTVMDLEANHAGEEISELFRWLSGV

SEQ ID NO: 358 - DNA, 724 bp, Arabidopsis thaliana
catcttatccaaagaaaaaatgaatccattttactctacattcccagactcgtttctctcaatctccgatcatagatctccggtttcagacagtagtgagtgttcaccaaagttagcttcaagttgtccaaagaaacgagctgggaggaagaagtttcgtgagacacgtcatccgatttacagaggagttcgtcagaggaattctggtaaatgggtttgtgaagttagagagcctaataagaaatctaggatttggttaggtacttttccgacggttgaaatggctgctcgtgctcatgatgttgctgctttagctcttcgtggtcgctctgcttgtctcaatttcgctgattctgcttggcggcttcgtattcctgagactacttgtcctaaggagattcagaaagctgcgtctgaagctgcaatggcgtttcagaatgagactacgacggagggatctaaaactgcggcggaggcagaggaggcggcaggggagggggtgagggagggggagaggagggcggaggagcagaatggtggtgtgttttatatggatgatgaggcgcttttggggatgcccaacttttttgagaatatggcggaggggatgcttttgccgccgccggaagttggctggaatcataacgactttgacggagtgggtgacgtgtcactctggagttttgacgagtaattttttggctctttttctggataataagtt

SEQ ID NO: 359 - protein, 224 aa, Arabidopsis thaliana
MNPFYSTFPDSFLSISDHRSPVSDSSECSPKLASSCPKKRAGRKKFRETRHPIYRGVRQRNSGKWVCEVREPNKKSRIWLGTFPTVEMAARAHDVAALALRGRSACLNFADSAWRLRIPETTCPKEIQKAASEAAMAFQNETTTEGSKTAAEAEEAAGEGVREGERRAEEQNGGVFYMDDEALLGMPNFFENMAEGMLLPPPEVGWNHNDFDGVGDVSLWSFDE

SEQ ID NO: 360 - DNA, 890 bp, Arabidopsis thaliana
cattcaaaaacatcatatatatacacaaacacactttgatacaacaaaaaaaaacagaacacaaacaaaaacacattgtaacattagtttaagcattaagcttctttatgtcgaataataataattctccgaccaccgtgaatcaagaaacgacgacgtctcgtgaagtctcaatcacattgcctactgatcaatctcctcaaacctcaccaggatcatcttcttctccttcaccgagaccttccggtggatcaccggcgagaagaacggcgactggattatccggcaagcactctattttcagggggattcgactacgtaacggaaaatgggtatcggagattagagagccacgtaaaacgacaagaatttggctcgggacttatccggtaccggagatggctgccgccgcttacgacgtggctgcgttagctttaaaaggacccgacgccgttttgaattttcctggtttagctttgacttacgtggctccggtttcaaactctgctgcggatataagagcggctgctagtagagcagcggagatgaagcaaccggatcagggtggggatgagaaggtattggaaccggttcaacccggcaaagaggaagaattagaagaagtgtcgtgtaactcgtgttcgttggagtttatggatgaggaagcgatgttgaatatgccgactttgttgacggagatggctgaagggatgttgatgagtccaccgagaatgatgatacatccgacgatggaagatgattcgccggagaatcatgaaggagataatctttggagttataaatgaatccattgaagctgctctcttttttattgttttccggtcgaatgagattttccccctttttttttttctttttgggtcgctgtt

SEQ ID NO: 361 - protein, 232 aa, Arabidopsis thaliana
MSNNNNSPTTVNQETTTSREVSITLPTDQSPQTSPGSSSSPSPRPSGGSPARRTATGLSGKHSIFRGIRLRNGKWVSEIREPRKTTRIWLGTYPVPEMAAAAYDVAALALKGPDAVLNFPGLALTYVAPVSNSAADIRAAASRAAEMKQPDQGGDEKVLEPVQPGKEEELEEVSCNSCSLEFMDEEAMLNMPTLLTEMAEGMLMSPPRMMIHPTMEDDSPENHEGDNLWSYK

SEQ ID NO: 362 - DNA, 1797 bp, Arabidopsis thaliana
aaaaaaaaaaacaatctaagatatctatcaagatcttaagatatctacatttatagagatgtttcgttttccggtaagtcttggaggaggtccacgtgagaatctgaagccatcagatgagcagcatcaacgtgcggtggtgaatgaggttgactttttccgatcagcggagaagagagatagggtttcacgtgaagaacaaaacattatcgccgatgagactcatagggttcatgtcaaaagggagaattcacgtgttgatgatcatgacgatcgttctactgatcacatcaatattggacttaatcttctcactgcgaatacgggaagcgacgagtcaatggtggatgatggattgtctgtggatatggaagagaaacgtacaaagtgtgagaatgcacaacttcgcgaagagctaaagaaggcgagtgaagataatcaaagactaaagcaaatgctaagtcaaacaaccaacaacttcaattccttgcagatgcaacttgttgctgtcatgaggcaacaagaagatcatcatcacctagctacgaccgagaacaatgacaatgtaaagaaccgacatgaagtgcctgaaatggttccaagacagttcatcgatttgggaccgcattctgacgaagtgtcgtccgaggagaggacgacggttcggtcgggatctcctccctcgcttctagagaaatctagctcacgtcaaaacggaaagagagtgcttgtaagagaagaaagcccggaaaccgaatccaacggctggagaaaccctaacaaagttcctaaacaccatgcatcatccagcatttgcggtggcaatggcagtgaaaatgcaagtagcaaggtcattgagcaagcggccgccgaagccaccatgcgtaaagcccgtgtctcggttcgtgctcgatccgaagctcccatgttaagcgatggatgtcaatggagaaaatacggacaaaaaatggcgaaaggaaacccgtgccctcgagcttattaccgttgcacaatggctgttggatgtcctgttcgcaagcaagtgcaacgttgcgcggaagatagaaccattctcataacaacctacgaaggaaaccataaccatccattacctcctgcggctatgaacatggcttcaactacaacagcagccgcaagcatgcttctctcaggctccaccatgtcgaaccaagacggtttaatgaacccaacaaatctcttggctcgaaccatattaccgtgttcctcaagcatggctactatctcagcctctgcaccattcccaaccattacattagacctcacagagtcacccaacgggaacaatccaaccaataacccgctgatgcaattctctcaacggtctggtttggtggagttgaaccaatcggttttgcctcatatgatgggtcaggctttgtactacaaccaacagtctaagttttcgggtttacatatgccgtctcagccgctaaacgctggtgagagtgttagcgccgctactgccgcaatcgcctccaatcccaactttgccgcggctctagctgcagccataacttcgattatcaacggttcgaacaatcagcagaatgggaacaacaataacagtaatgttacaacgagcaacgttgacaataggcaataacatttttttataagttttagttagggactttttatcggtcgattttgttttgtttttcttttattacattattttttagttacggcttttttttgttttttcttttctttcccaaacaacaagtattgagagcaattcccccccccccccct

SEQ ID NO: 363 - protein, 528 aa, Arabidopsis thaliana
MFRFPVSLGGGPRENLKPSDEQHQRAVVNEVDFFRSAEKRDRVSREEQNIIADETHRVHVKRENSRVDDHDDRSTDHINIGLNLLTANTGSDESMVDDGLSVDMEEKRTKCENAQLREELKKASEDNQRLKQMLSQTTNNFNSLQMQLVAVMRQQEDHHHLATTENNDNVKNRHEVPEMVPRQFIDLGPHSDEVSSEERTTVRSGSPPSLLEKSSSRQNGKRVLVREESPETESNGWRNPNKVPKHHASSSICGGNGSENASSKVIEQAAAEATMRKARVSVRARSEAPMLSDGCQWRKYGQKMAKGNPCPRAYYRCTMAVGCPVRKQVQRCAEDRTILITTYEGNHNHPLPPAAMNMASTTTAAASMLLSGSTMSNQDGLMNPTNLLARTILPCSSSMATISASAPFPTITLDLTESPNGNNPTNNPLMQFSQRSGLVELNQSVLPHMMGQALYYNQQSKFSGLHMPSQPLNAGESVSAATAAIASNPNFAAALAAAITSIINGSNNQQNGNNNNSNVTTSNVDNRQ

SEQ ID NO: 364 - DNA, 642 bp, Arabidopsis thaliana
atgaggaaaggtaagagagtgataaaaaagatagaggagaaaataaagagacaagtgacattcgcaaagagaaagaagagtctaatcaagaaggcatatgaactctctgttctctgcgatgtccaccttggtctcatcatcttctctcactccaacaggctctacgatttctgctccaactctaccagcatggagaatctcatcatgagataccaaaaggaaaaagaaggtcaaaccactgcagaacacagtttccactcgtgttcagattgcgtgaagacgaaggaatcaatgatgagagagatagagaatcttaagctgaatcttcaattgtacgacggacatggcttgaatctcttgacctacgacgagctcctttcttttgagctccatctcgaatcttctctacaacatgctcgagctcgcaagtctgagttcatgcatcagcagcagcagcaacaaacagatcaaaagcttaagggaaaagaaaagggtcaaggaagctcttgggagcagctgatgtggcaagcagagagacagatgatgacgtgtcaaagacaaaaagatcctgcgccggcgaatgaaggaggagttccttttttacggtggggaacaacccaccgacgttcttcacctccttaa

SEQ ID NO: 365 - protein, 213 aa, Arabidopsis thaliana
MRKGKRVIKKIEEKIKRQVTFAKRKKSLIKKAYELSVLCDVHLGLIIFSHSNRLYDFCSNSTSMENLIMRYQKEKEGQTTAEHSFHSCSDCVKTKESMMREIENLKLNLQLYDGHGLNLLTYDELLSFELHLESSLQHARARKSEFMHQQQQQQTDQKLKGKEKGQGSSWEQLMWQAERQMMTCQRQKDPAPANEGGVPFLRWGTTHRRSSPP

SEQ ID NO: 366 - DNA, 1296 bp, Arabidopsis thaliana
aaaaaatctattttcttctctttccactatattacaacatttcttcattctcaaatcatcatactaaaaacctaaaaaaagttacatattcattgtatctttgtgagaaaaaaatggattcgaatagtaacaacacgaaatccataaagagaaaagttgtcgaccaacttgtcgaaggctatgaattcgctactcagcttcagcttctcctttctcatcaacactctaaccagtaccacatcgatgagacccgtcttgtttccgggtcgggttcagtttccggtggtccagatcccgttgatgagctcatgtctaagatcttgggatctttccataaaactatatcggttcttgattcttttgatcccgtcgccgtctctgtccccatcgccgtcgagggttcatggaatgcttcatgtggggatgattcggcgactccggtgagttgcaacggtggagattccggtgagagtaagaagaagagattaggggttggtaagggtaaaagaggatgctacactagaaagacgagatcacatacaaggatcgtggaagctaaaagttctgaagacagatatgcttggaggaaatatggacaaaaggagattcttaataccacattcccaagaagttactttagatgcacacacaagccaacgcaaggatgcaaagcaacaaagcaagttcagaaacaggatcaagattctgagatgttccaaatcacatacattggctaccacacatgcactgccaatgaccaaacgcacgcgaagaccgagccttttgatcaagaaatcattatggattcggaaaagacattggctgctagcactgctcagaaccatgtcaatgctatggtgcaagagcaagagaacaacaccagcagtgtgacagcaatagacgcaggcatggttaaggaggaacaaaataacaatggtgatcagagtaaagattattatgagggctcttcgacaggtgaggacttgtcattggtttggcaagagacgatgatgtttgatgatcatcaaaatcactactattgtggtgaaaccagtactacttctcatcaatttggtttcatcgacaacgatgatcagttttcctccttcttcgactcatattgtgctgattatgaaagaacaagtgctatgtgaacatccaaatctggaatgatgaatcagcactaggtcttctctttgagtatgtctagtttaatgtaatatttttgttgtatgtttgataaaaacaccatatatacttctctttttacaccaaaaaaaaaaaaaaaaaaaaaaa

SEQ ID NO: 367 - protein, 346 aa, Arabidopsis thaliana
MDSNSNNTKSIKRKVVDQLVEGYEFATQLQLLLSHQHSNQYHIDETRLVSGSGSVSGGPDPVDELMSKILGSFHKTISVLDSFDPVAVSVPIAVEGSWNASCGDDSATPVSCNGGDSGESKKKRLGVGKGKRGCYTRKTRSHTRIVEAKSSEDRYAWRKYGQKEILNTTFPRSYFRCTHKPTQGCKATKQVQKQDQDSEMFQITYIGYHTCTANDQTHAKTEPFDQEIIMDSEKTLAASTAQNHVNAMVQEQENNTSSVTAIDAGMVKEEQNNNGDQSKDYYEGSSTGEDLSLVWQETMMFDDHQNHYYCGETSTTSHQFGFIDNDDQFSSFFDSYCADYERTSAM

SEQ ID NO: 368 - DNA, 1053 bp, Arabidopsis thaliana
cgctctctccttatactctccattcgctctctctctttcgctttctatctcctagaaaaaatgtcagtcaaccattactccacagaccaccaccacactctcttgtggcagcaacagcaacaccgccacaccaccgacacatcggagacaaccaccaccgccacatggctccacgacgacctaaaagagtcactcttcgagaagtctctcacaccaagcgacgtcgggaaactcaaccgcctcgtcataccaaaacaacacgcagagaaatacttccctctcaatgccgtcctagtctcctctgctgctgctgacacgtcatcttcggagaaagggatgcttctaagctttgaagacgagtcaggcaagtcatggaggttcagatactcttactggaacagcagtcaaagctatgtcttgactaaaggatggagcagatttgtcaaagacaaacagctcgatccaggcgacgttgttttcttccaacgacaccgttctgattctaggagactcttcattggctggcgcagacgtggacaaggctcctcatcctccgtcgcggccactaactccgccgtgaatacgagttctatgggagctctttcttatcatcaaatccacgccactagtaattactctaatcctccctctcactcagagtattcccactatggagccgccgtagcaacagcggctgagactcacagcacaccgtcgtcttccgtcgtcgggagctcaaggacggtgaggcttttcggtgtgaatctggagtgtcaaatggatgaaaacgacggagatgattctgttgcagttgccaccaccgttgaatctcccgacggttactacggccaaaacataatatagctttcacgggagaacgatgaaggagcagagagataagacgaggatgagagatccaaagaagtgacaacattttcggaattgacttaaagctttatgggaccagactttgtagccacataggccaattttctggaaaattgtatgctatttttaataatatctcattagcttccgtactgtatgtaacta

SEQ ID NO: 369 - protein, 267 aa, Arabidopsis thaliana
MSVNHYSTDHHHTLLWQQQQHRHTTDTSETTTTATWLHDDLKESLFEKSLTPSDVGKLNRLVIPKQHAEKYFPLNAVLVSSAAADTSSSEKGMLLSFEDESGKSWRFRYSYWNSSQSYVLTKGWSRFVKDKQLDPGDVVFFQRHRSDSRRLFIGWRRRGQGSSSSVAATNSAVNTSSMGALSYHQIHATSNYSNPPSHSEYSHYGAAVATAAETHSTPSSSVVGSSRTVRLFGVNLECQMDENDGDDSVAVATTVESPDGYYGQNII

SEQ ID NO: 370 - DNA, 1250 bp, Arabidopsis thaliana
aagtgtatcttgatctagggttcacagacaaaatctccatgctttgaactaagcagaattcatctggtcttttatctctttcatatcaaaccaaaggattgatctatccatatcgtccaaaacctatatctagctaagcctagaacttctctatcgtttaccactttctttctatatttcttctgaatttgtaacatcagaagtaataatgattccaagtatggagggaggcgggaagactaacagagaagaagaggaggaggaagaggaagaagaagaagaaggtgaagagagtaaggtttcaagcaatagtacagtggaagagagcgacaagaagactaaggttaggccttatgtgagatctaaagtccctcgactccggtggactcctgatcttcatcttcgctttgtccgcgccgttgagaggcttggaggtcaagaaagagcaactccaaagttggttcgtcagatgatgaacatcaaagggcttagtattgctcatgtcaagagccatctacagatgtacagaagcaagaagatagatgatcaaggtcaagctatagctggtcacaaacatctcttcgagacttccacagatcgaaatatttataaactaagtcagctaccgatgttccgaggctataatcataaccatgattctccattcagatatggaagtaaaatttcaaatgcttctttgtggaactctagctctcaaggaacagaaaggagtttgatagaccaaattaggcccggtttaatccgcaacgcgtcggttagcaataacatccgtggtagtgattattggactaacaacaagtctttccaaaacatctactcttcttcaatttctaatcactttccgaaactacgacacgatcatcacgaacggaccaattcagtcacattcaacagcattcaaggacactcaagaacttttcaaaagttccataacggtgttgaggagaacactaatcattcttattgtagcaagacaaatggcaaaagagacgcaagtaggagcattgatcttgatctatctcttaagctaagacaaccggagaagacaattttggaagagacagaaacagcagcaacaacaacggatcaaacgttgtccttgtcgctatgtccagggtcgtcttcgtggaaaaagagccgactgatgaaagatgaagaggatcggacggttaagattggtcaggagagtactctggatctgactctatgaattatatttaagaatgaga

SEQ ID NO: 371 - protein, 340 aa, Arabidopsis thaliana
MIPSMEGGGKTNREEEEEEEEEEEEGEESKVSSNSTVEESDKKTKVRPYVRSKVPRLRWTPDLHLRFVRAVERLGGQERATPKLVRQMMNIKGLSIAHVKSHLQMYRSKKIDDQGQAIAGHKHLFETSTDRNIYKLSQLPMFRGYNHNHDSPFRYGSKISNASLWNSSSQGTERSLIDQIRPGLIRNASVSNNIRGSDYWTNNKSFQNIYSSSISNHFPKLRHDHHERTNSVTFNSIQGHSRTFQKFHNGVEENTNHSYCSKTNGKRDASRSIDLDLSLKLRQPEKTILEETETAATTTDQTLSLSLCPGSSSWKKSRLMKDEEDRTVKIGQESTLDLTL

SEQ ID NO: 372 - DNA, 1722 bp, Arabidopsis thaliana
cagattctatggatatgtataacaacaatatagggatgttccggagtttagtttgtagctcggcgcctccatttacagagggacatatgtgttctgattcgcatacggctttgtgcgatgatctgagtagtgatgaggaaatggaaatagaggagcttgagaagaagatctggagagacaagcagcgtttaaagcggctcaaggaaatggcgaagaacggtctaggaacaagattgttgttgaagcagcaacatgatgattttccagagcactctagtaagagaaccatgtacaaggcacaagatgggatcttgaagtacatgtcgaagacaatggagcgatataaagctcaaggttttgtttatgggattgtgttagagaatgggaaaacggtagcgggatcttctgataatctccgtgaatggtggaaagacaaagtgaggtttgataggaacggcccagctgctataatcaagcaccaaagggatatcaatctttctgatggaagtgattcagggtctgaggttggggattctaccgcacagaagttgcttgagcttcaagatactactcttggagctctgttatcggctctgtttcctcactgcaaccctcctcagaggcggtttccgttggagaaaggcgtgacaccgccatggtggccaacggggaaagaagattggtgggatcaactgtctttacccgttgattttcgaggtgttccgccaccttacaagaagcctcatgatctcaagaagctgtggaaaattggtgttttgattggtgtaatcagacatatggcttctgacattagcaacatacccaatctcgtgagacggtctagaagtttgcaggagaaaatgacgtcaagagaaggcgctttatggctcgctgctctttaccgagaaaaggctattgttgatcaaatagccatgtctagagaaaacaacaacacttctaactttcttgttcctgcaaccggtggagacccagatgttttgtttcctgaatctacagactatgatgttgaactgattggtggcactcatcggaccaatcagcagtatcctgaatttgaaaacaactacaactgtgtttacaagagaaagtttgaagaagattttgggatgccaatgcatccaacactcctaacatgtgagaacagtctctgtccttatagccaaccacatatgggatttcttgacaggaacttaagagagaatcaccaaatgacttgtccttataaagtcacttccttctaccaaccaactaaaccctatggtatgacgggtttaatggttccttgtccggattataacgggatgcagcagcaggttcagagctttcaagaccagtttaatcatcccaacgatctctacagaccaaaagctccacaaagaggcaacgatgacttggttgaggatttgaatccttctccttcgacgctgaatcagaatcttggtttagtcttacctactgacttcaatggaggtgaggaaacagtaggaacagagaacaatctgcataatcaagggcaagagttgcccacatcttggattcagtaaagaaagcttcagagttttctttttatgttttctagtctttatagctttgtctcttgcttattctctcattaaacacagtttttgatctctccatttcatagcccatgtagcaatggagaagattaggtttcataataagttaataaccaaattcaaa

SEQ ID NO: 373 - protein, 518 aa, Arabidopsis thaliana
MDMYNNNIGMFRSLVCSSAPPFTEGHMCSDSHTALCDDLSSDEEMEIEELEKKIWRDKQRLKRLKEMAKNGLGTRLLLKQQHDDFPEHSSKRTMYKAQDGILKYMSKTMERYKAQGFVYGIVLENGKTVAGSSDNLREWWKDKVRFDRNGPAAIIKHQRDINLSDGSDSGSEVGDSTAQKLLELQDTTLGALLSALFPHCNPPQRRFPLEKGVTPPWWPTGKEDWWDQLSLPVDFRGVPPPYKKPHDLKKLWKIGVLIGVIRHMASDISNIPNLVRRSRSLQEKMTSREGALWLAALYREKAIVDQIAMSRENNNTSNFLVPATGGDPDVLFPESTDYDVELIGGTHRTNQQYPEFENNYNCVYKRKFEEDFGMPMHPTLLTCENSLCPYSQPHMGFLDRNLRENHQMTCPYKVTSFYQPTKPYGMTGLMVPCPDYNGMQQQVQSFQDQFNHPNDLYRPKAPQRGNDDLVEDLNPSPSTLNQNLGLVLPTDFNGGEETVGTENNLHNQGQELPTSWIQ

SEQ ID NO: 374 - DNA, 1077 bp, Arabidopsis thaliana
atggctgataataaggtcaatctttcgattaatggacaatcaaaagtgcctccaggtttcagattccatcccaccgaagaagaacttctccattactatctccgtaagaaagttaactctcaaaagatcgatcttgatgtcattcgtgaagttgatctaaacaagcttgagccttgggatattcaagaggaatgtagaatcggttcaacgccacaaaacgactggtacttcttcagccacaaggacaagaagtatccaaccgggaccaggacgaaccgggcaacagtcgctggattctggaaagctaccggacgtgacaaaatcatctgcagttgtgtccggagaattggactgaggaagacactcgtgttctacaaaggaagagctcctcacggtcagaaatccgactggatcatgcatgagtatcgcctcgacgatactccaatgtctaatggctatgctgatgttgttacagaagatccaatgagctataacgaagaaggttgggtggtatgtcgagtgttcaggaagaagaactatcaaaagattgacgattgtcctaaaatcactctatcttctttacctgatgacacggaggaagagaaggggcccacctttcacaacactcaaaacgttaccggtttagaccatgttcttctctacatggaccgtaccggttctaacatttgcatgcccgagagccaaacaacgactcaacatcaagatgatgtcttattcatgcaactcccaagtcttgagacacctaaatccgagagcccggtcgaccaaagtttcctgactccaagcaaactcgatttctctcccgttcaagagaagataaccgaaagaccggtttgcagcaactgggctagtcttgaccggctcgtagcttggcaattgaacaatggtcatcataatccgtgtcatcgtaagagttttgatgaagaagaagaaaatggtgatactatgatgcagcgatgggatcttcattggaataatgatgataatgttgatctttggagtagtttcactgagtcttcttcgtctttagacccacttcttcatttatctgtatga

SEQ ID NO: 375 - protein, 358 aa, Arabidopsis thaliana
MADNKVNLSINGQSKVPPGFRFHPTEEELLHYYLRKKVNSQKIDLDVIREVDLNKLEPWDIQEECRIGSTPQNDWYFFSHKDKKYPTGTRTNRATVAGFWKATGRDKIICSCVRRIGLRKTLVFYKGRAPHGQKSDWIMHEYRLDDTPMSNGYADVVTEDPMSYNEEGWVVCRVFRKKNYQKIDDCPKITLSSLPDDTEEEKGPTFHNTQNVTGLDHVLLYMDRTGSNICMPESQTTTQHQDDVLFMQLPSLETPKSESPVDQSFLTPSKLDFSPVQEKITERPVCSNWASLDRLVAWQLNNGHHNPCHRKSFDEEEENGDTMMQRWDLHWNNDDNVDLWSSFTESSSSLDPLLHLSV

SEQ ID NO: 376 - DNA, 1095 bp, Arabidopsis thaliana
atgtcaaaatctatgagcatatcagtgaacggacaatctcaagtgcctcctgggtttaggtttcatccgaccgaggaagagctgttgcagtattatctccggaagaaagttaatagcatcgagatcgatcttgatgtcattcgcgacgttgatctcaacaagctcgagccttgggacattcaagagatgtgtaaaataggaacaacgccacaaaacgactggtatttctttagccacaaggacaaaaaatatccgacgggaacgagaactaacagagccactgcggctggattttggaaagcaactggccgcgacaagatcatatatagcaatggccgtagaattgggatgagaaagactcttgttttctacaaaggccgagctcctcacggccaaaaatctgattggatcatgcatgaatatagactcgatgacaacattatttcccccgaggatgtcaccgttcatgaggtcgtgagtattataggggaagcatcacaagacgaaggatgggtggtgtgtcgtattttcaagaagaagaatcttcacaaaaccctaaacagtcccgtcggaggagcttccctgagcggcggcggagatacgccgaagacgacatcatctcagatcttcaacgaggatactctcgaccaatttcttgaacttatggggagatcttgtaaagaagagctaaatcttgaccctttcatgaaactcccaaacctcgaaagccctaacagtcaggcaatcaacaactgccacgtaagctctcccgacactaatcataatatccacgtcagcaacgtggtcgacactagctttgttactagctgggcggctttagaccgcctcgtggcctcgcagcttaacggacccacatcatattcaattacagccgtcaatgagagccacgtgggccatgatcatctcgctttgccttccgtccgatctccgtaccccagcctaaaccggtccgcttcgtaccacgccggtttaacacaggaatatacaccggagatggagctatggaatacgacgacgtcgtctctatcgtcatcgcctggcccattttgtcacgtgtcgaatggtagtggataa

SEQ ID NO: 377 - protein, 364 aa, Arabidopsis thaliana
MSKSMSISVNGQSQVPPGFRFHPTEEELLQYYLRKKVNSIEIDLDVIRDVDLNKLEPWDIQEMCKIGTTPQNDWYFFSHKDKKYPTGTRTNRATAAGFWKATGRDKIIYSNGRRIGMRKTLVFYKGRAPHGQKSDWIMHEYRLDDNIISPEDVTVHEVVSIIGEASQDEGWVVCRIFKKKNLHKTLNSPVGGASLSGGGDTPKTTSSQIFNEDTLDQFLELMGRSCKEELNLDPFMKLPNLESPNSQAINNCHVSSPDTNHNIHVSNVVDTSFVTSWAALDRLVASQLNGPTSYSITAVNESHVGHDHLALPSVRSPYPSLNRSASYHAGLTQEYTPEMELWNTTTSSLSSSPGPFCHVSNGSG

SEQ ID NO: 378 - DNA, 833 bp, Arabidopsis thaliana
  misc_feature (810)..(810): n is a, c, g, or t
caccaaactcacctgaaaccctatttccatttaccattcacactaatggcacgaccacaacaacgctttcgaggcgttagacagaggcattggggctcttgggtctccgaaattcgtcaccctctcttgaaaacaagaatctggctagggacgtttgagacagcggaggatgcagcaagggcctacgacgaggcggctaggctaatgtgtggcccgagagctcgtactaatttcccatacaaccctaatgccattcctacttcctcttccaagcttctatcagcaactcttaccgctaaactccacaaatgctacatggcttctcttcaaatgaccaagcaaacgcaaacacaaacgcaaacgcagaccgcaagatcacaatccgcggacagtgacggtgtgacggctaacgaaagtcatttgaacagaggagtaacggagacgacagagatcaagtgggaagatggaaatgcgaatatgcaacagaattttaggccattggaggaagatcatatcgagcaaatgattgaggagctgcttcactacggttccattgagctttgctctgttttaccaactcagacgctgtgagaaatggccttgtcgttttagcgtattcttttcatttttatttttgtttccacaaaaacggcgtcgtaagtgatgagagtagtagtgagagaaggctaatttcaagacattttgatctgaattggcctcttttgaaacactgattctagtttctataagagcaatcgatcatatgctatgttatgtatagtattataaaaaaatgttattttctgattnaaaaaaaaaaaaaaaaaaaaaaa

SEQ ID NO: 379 - protein, 181 aa, Arabidopsis thaliana
MARPQQRFRGVRQRHWGSWVSEIRHPLLKTRIWLGTFETAEDAARAYDEAARLMCGPRARTNFPYNPNAIPTSSSKLLSATLTAKLHKCYMASLQMTKQTQTQTQTQTARSQSADSDGVTANESHLNRGVTETTEIKWEDGNANMQQNFRPLEEDHIEQMIEELLHYGSIELCSVLPTQTL

SEQ ID NO: 380 - DNA, 1530 bp, Arabidopsis thaliana
  misc_feature (1499)..(1500): n is a, c, g, or t
  misc_feature (1503)..(1503): n is a, c, g, or t
  misc_feature (1505)..(1505): n is a, c, g, or t
  misc_feature (1507)..(1507): n is a, c, g, or t
  misc_feature (1512)..(1512): n is a, c, g, or t
  misc_feature (1514)..(1514): n is a, c, g, or t
  misc_feature (1518)..(1518): n is a, c, g, or t
cctctgaggaatcaaatcactcacactccaaaaaaaaatctaaactttctcagagtttaatgaagaagcgcttaaccacttccacttgttcttcttctccatcttcctctgtttcttcttctactactacttcctctcctattcagtcggaggctccaaggcctaaacgagccaaaagggctaagaaatcttctccttctggtgataaatctcataacccgacaagccctgcttctacccgacgcagctctatctacagaggagtcactagacatagatggactgggagattcgaggctcatctttgggacaaaagctcttggaattcgattcagaacaagaaaggcaaacaagtttatctgggagcatatgacagtgaagaagcagcagcacatacgtacgatctggctgctctcaagtactggggacccgacaccatcttgaattttccggcagagacgtacacaaaggaattggaagaaatgcagagagtgacaaaggaagaatatttggcttctctccgccgccagagcagtggtttctccagaggcgtctctaaatatcgcggcgtcgctaggcatcaccacaacggaagatgggaggctcggatcggaagagtgtttgggaacaagtacttgtacctcggcacctataatacgcaggaggaagctgctgcagcatatgacatggctgcgattgagtatcgaggcgcaaacgcggttactaatttcgacattagtaattacattgaccggttaaagaagaaaggtgttttcccgttccctgtgaaccaagctaaccatcaagagggtattcttgttgaagccaaacaagaagttgaaacgagagaagcgaaggaagagcctagagaagaagtgaaacaacagtacgtggaagaaccaccgcaagaagaagaagagaaggaagaagagaaagcagagcaacaagaagcagagattgtaggatattcagaagaagcagcagtggtcaattgctgcatagactcttcaaccataatggaaatggatcgttgtggggacaacaatgagctggcttggaacttctgtatgatggatacagggttttctccgtttttgactgatcagaatctcgcgaatgagaatcccatagagtatccggagctattcaatgagttagcatttgaggacaacatcgacttcatgttcgatgatgggaagcacgagtgcttgaacttggaaaatctggattgttgcgtggtgggaagagagagcccaccctcttcttcttcaccattgtcttgcttatctactgactctgcttcatcaacaacaacaacaacaacctcggtttcttgtaactatttggtctgagagagagagctttgccttctagtttgaatttctatttcttccgcttcttcttcttttttttcttttgttgggttctgcttagggtttgtatttcagtttcagggcttgttcgttggttctgaataatcaatgtctttgccccttttnnaangntncaagntnaaanaaaaaaaaaaaa

SEQ ID NO: 381 - protein, 430 aa, Arabidopsis thaliana
MKKRLTTSTCSSSPSSSVSSSTTTSSPIQSEAPRPKRAKRAKKSSPSGDKSHNPTSPASTRRSSIYRGVTRHRWTGRFEAHLWDKSSWNSIQNKKGKQVYLGAYDSEEAAAHTYDLAALKYWGPDTILNFPAETYTKELEEMQRVTKEEYLASLRRQSSGFSRGVSKYRGVARHHHNGRWEARIGRVFGNKYLYLGTYNTQEEAAAAYDMAAIEYRGANAVTNFDISNYIDRLKKKGVFPFPVNQANHQEGILVEAKQEVETREAKEEPREEVKQQYVEEPPQEEEEKEEEKAEQQEAEIVGYSEEAAVVNCCIDSSTIMEMDRCGDNNELAWNFCMMDTGFSPFLTDQNLANENPIEYPELFNELAFEDNIDFMFDDGKHECLNLENLDCCVVGRESPPSSSSPLSCLSTDSASSTTTTTTSVSCNYLV

SEQ ID NO: 382 - DNA, 1742 bp, Arabidopsis thaliana
aaaataatatttattattgccattgaaaaagactcatttgatcgagagagaaaaagaatcatttgaaccaaaagcatctttttctatcttttcaaatgcttacttccttcaaatcctctagctcctcctccgaagatgccaccgctaccaccaccgagaatcctcctcctttgtgcatcgcctcctcctcggccgcaacctccgcctcacatcacctccgtcgtcttcttttcaccgctgcgaatttcgtctcccagtcaaacttcaccgccgctcaaaacttactctcaatcctctcccttaactcttctcctcacggcgactccaccgagcgacttgtacacctcttcactaaagccttgtccgtacgaatcaaccgtcagcaacaagatcagacggctgaaacggttgccacgtggacgacgaacgaaatgacgatgagtaactccacggtgttcacgagcagtgtatgcaaagaacagttcttgtttcgaaccaagaacaacaattctgacttcgagtcttgttactatctttggctaaaccaactaacgccgtttattcggttcggtcatttaacggcgaaccaagctatcctcgacgcgacggagacaaacgataacggagctctacatatacttgatttagatatatcacaaggacttcaatggcctccattgatgcaagccctagcagagaggtcatcaaaccctagcagtccacctccatctctccgcataaccggatgcggtcgagatgtaaccggattaaaccgaactggagaccggttaacccggttcgctgactctttaggtctccaattccagtttcacacgctagtgatcgtagaagaagatctcgccggacttttgctacagatccgattgttagctctctcagccgtacaaggagagaccattgccgtcaattgtgttcacttcctccacaaaatatttaacgacgatggagatatgatcggtcacttcttgtcagcgatcaagagcttaaactctagaatcgttacaatggcagagagagaagctaatcatggagatcactcgttcttgaatagattctctgaggcagtggatcattacatggcgatctttgattcgttggaagcgacgttgccgccaaatagccgagagagactaaccctagagcaacggtggttcggtaaggagattttggatgttgtggcggcggaagagacggagagaaagcaaagacatcggaggtttgagatttgggaagagatgatgaagaggtttggtttcgttaacgttcctattggaagctttgctttgtctcaagctaagcttcttcttagacttcattatccttcagaaggttataatcttcagttccttaacaattctttgtttcttggctggcaaaatcgtcccctcttctccgtttcgtcgtggaaatgatccaaagagaaggacaaaaaaacctatatatctaggtatatagtagacaaaaaaaaagatcgataatttttggtgttagggcaaaaaatgattaagcagatgatggaagaggacgatggctccggcgaagattgtcgacgccggcggattcttgggatgtgtgtctttttgtttcttgggaagctcaaacaaagagacaacctaatcttttgtgtttttaacctactaatatttactaatatctatattttttttgtcaaactcaatcttaggtgtatcgttttgacatatataatcccattctgtctc

SEQ ID NO: 383 - protein, 445 aa, Arabidopsis thaliana
MLTSFKSSSSSSEDATATTTENPPPLCIASSSAATSASHHLRRLLFTAANFVSQSNFTAAQNLLSILSLNSSPHGDSTERLVHLFTKALSVRINRQQQDQTAETVATWTTNEMTMSNSTVFTSSVCKEQFLFRTKNNNSDFESCYYLWLNQLTPFIRFGHLTANQAILDATETNDNGALHILDLDISQGLQWPPLMQALAERSSNPSSPPPSLRITGCGRDVTGLNRTGDRLTRFADSLGLQFQFHTLVIVEEDLAGLLLQIRLLALSAVQGETIAVNCVHFLHKIFNDDGDMIGHFLSAIKSLNSRIVTMAEREANHGDHSFLNRFSEAVDHYMAIFDSLEATLPPNSRERLTLEQRWFGKEILDVVAAEETERKQRHRRFEIWEEMMKRFGFVNVPIGSFALSQAKLLLRLHYPSEGYNLQFLNNSLFLGWQNRPLFSVSSWK

SEQ ID NO: 384 - DNA, 1239 bp, Arabidopsis thaliana
caaatatggaatacagctgtgtagacgacagtagtacaacgtcagaatctctctccatctctactactccaaagccgacaacgacgacggagaagaaactctcttctccgccggcgacgtcgatgcgtctctacagaatgggaagcggcggaagcagcgtcgttttggattcagagaacggcgtcgagaccgagtcacgtaagcttccttcgtcgaaatataaaggcgttgtgcctcagcctaacggaagatggggagctcagatttacgagaagcatcagcgagtttggctcggtactttcaacgaggaagaagaagctgcgtcttcttacgacatcgccgtgaggagattccgcggccgcgacgccgtcactaacttcaaatctcaagttgatggaaacgacgccgaatcggcttttcttgacgctcattctaaagctgagatcgtggatatgttgaggaaacacacttacgccgatgagtttgagcagagtagacggaagtttgttaacggcgacggaaaacgctctgggttggagacggcgacgtacggaaacgacgctgttttgagagcgcgtgaggttttgttcgagaagactgttacgccgagcgacgtcgggaagctgaaccgtttagtgataccgaaacaacacgcggagaagcattttccgttaccggcgatgacgacggcgatggggatgaatccgtctccgacgaaaggcgttttgattaacttggaagatagaacagggaaagtgtggcggttccgttacagttactggaacagcagtcaaagttacgtgttgaccaagggctggagccggttcgttaaagagaagaatcttcgagccggtgatgtggtttgtttcgagagatcaaccggaccagaccggcaattgtatatccactggaaagtccggtctagtccggttcagactgtggttaggctattcggagtcaacattttcaatgtgagtaacgagaaaccaaacgacgtcgcagtagagtgtgttggcaagaagagatctcgggaagatgatttgttttcgttagggtgttccaagaagcaggcgattatcaacatcttgtgacaaattctttttttttggtttttttcttcaatttgtttctcctttttcaatattttgtattgaaatgacaagttgtaaattaggacaagacaagaaaaaatgacaactagacaaaatagtttttgtttaaaaaaaaaaaaaaaaaaaa

SEQ ID NO: 385 - protein, 361 aa, Arabidopsis thaliana
MEYSCVDDSSTTSESLSISTTPKPTTTTEKKLSSPPATSMRLYRMGSGGSSVVLDSENGVETESRKLPSSKYKGVVPQPNGRWGAQIYEKHQRVWLGTFNEEEEAASSYDIAVRRFRGRDAVTNFKSQVDGNDAESAFLDAHSKAEIVDMLRKHTYADEFEQSRRKFVNGDGKRSGLETATYGNDAVLRAREVLFEKTVTPSDVGKLNRLVIPKQHAEKHFPLPAMTTAMGMNPSPTKGVLINLEDRTGKVWRFRYSYWNSSQSYVLTKGWSRFVKEKNLRAGDVVCFERSTGPDRQLYIHWKVRSSPVQTVVRLFGVNIFNVSNEKPNDVAVECVGKKRSREDDLFSLGCSKKQAIINIL

SEQ ID NO: 386 - DNA, 954 bp, Arabidopsis thaliana
atgggaagacctccttgttgtgacaagtccaatgtcaagaaaggtctctggaccgaggaagaagacgctaagatccttgcttatgttgctatccatggtgtaggaaactggagcttgatccccaaaaaagcaggtctgaatcgatgtggaaagagctgtagactaagatggactaattacttaagacctgaccttaaacatgacagcttctctacccaagaagaagagcttatcattgagtgtcatagagccattggcagcaggtggtcttccattgcacgaaagcttccaggaagaacggataatgatgtgaagaatcactggaacacaaagctgaagaagaagctgatgaaaatggggatagacccggtgactcataaaccggtttctcaactccttgcagaattcagaaacattagcggccatggaaatgcatccttcaaaacagaaccatctaacaactctatactcacacaatccaactcagcttgggaaatgatgagaaacacaacaacaaaccatgagagttattacaccaactctccaatgatgtttacaaattcctctgagtaccaaactactccatttcatttctatagccatccaaatcatctgctcaatggaaccacatcttcatgctcttcctcatcatcttctactagtatcactcagccaaaccaagtacctcaaacaccggttactaacttctactggagcgatttccttctctcggacccggttcctcaagtagtgggatcctcagctactagcgacctcacttttacgcagaacgaacatcatttcaacatcgaagccgaatacatctctcaaaacatcgattcaaaggcctcgggaacatgtcattccgcgagttccttcgttgacgaaatactagataaagaccaagagatgttgtcacagtttcctcaactcttgaatgatttcgattattag

SEQ ID NO: 387 - protein, 317 aa, Arabidopsis thaliana
MGRPPCCDKSNVKKGLWTEEEDAKILAYVAIHGVGNWSLIPKKAGLNRCGKSCRLRWTNYLRPDLKHDSFSTQEEELIIECHRAIGSRWSSIARKLPGRTDNDVKNHWNTKLKKKLMKMGIDPVTHKPVSQLLAEFRNISGHGNASFKTEPSNNSILTQSNSAWEMMRNTTTNHESYYTNSPMMFTNSSEYQTTPFHFYSHPNHLLNGTTSSCSSSSSSTSITQPNQVPQTPVTNFYWSDFLLSDPVPQVVGSSATSDLTFTQNEHHFNIEAEYISQNIDSKASGTCHSASSFVDEILDKDQEMLSQFPQLLNDFDY

SEQ ID NO: 388 - DNA, 1281 bp, Arabidopsis thaliana
gctttttgtgttgaagagagagtttcctatcttctccattcctcccaccatctccctcatcttcatcttcctctctctttctctctttctcaacaatctctattagatctttctccattaccattacctctggctttctcttaaatccaccatcatgaggagaggaagaggctcttccgccgtcgccggacctaccgtcgttgccgccatcaacggatctgtaaaagaaatcagattcagaggcgtaaggaagagaccttggggacgattcgcagctgagatccgtgatccatggaaaaaagctcgtgtttggttaggtactttcgattccgccgaagaagctgctcgcgcttacgactccgccgctcgtaacctccgtggtcctaaagccaaaactaatttccccatcgattcttcttctcctcctcctcctaatctccgatttaatcagattcgtaatcaaaatcaaaaccaagtcgatccgtttatggaccaccggttattcaccgaccatcaacaacagttcccgattgttaaccggcctactagtagcagcatgagcagcaccgttgaatcgtttagcggacccagacctacgacgatgaaaccggccacgacgaagagatatcctagaactccaccggttgttccggaggattgtcacagcgattgcgattcgtcgtcgtctgtaatcgacgacgacgacgatatcgcatcgtcttcacggcgacggaatccgccgtttcaattcgatcttaattttccaccgttggattgtgttgacttgttcaatggcgctgatgatcttcactgtaccgatctacgtctctaatgaattggtaaaatcaaactcaaaatcacagatccgtgatcggtttgattttaatcgaaaacacacaacaaaatccttttttttttttttttaaattttctgtttcgttgatctcatataatttttactatgcgggagaaatagaaagacaaagaaacgaagaagaagaagaagatggtgatgagcttgagagagcttgagctggttctgtgtttcttctgtgatgatattgtaagagtattattattttactattattactaaatcttcaaaaccaagaagaagaagaccgaacacgatgatctgttgtgtctgtttgttttactgtaagaaaaacgcagatctgggtttcgtttttttcttgagatagatcaaacaacccccatctttgtaacatatacatttggaacactcatgattctaaataaaaaatctagaatctttttttc

SEQ ID NO: 389 - protein, 225 aa, Arabidopsis thaliana
MRRGRGSSAVAGPTVVAAINGSVKEIRFRGVRKRPWGRFAAEIRDPWKKARVWLGTFDSAEEAARAYDSAARNLRGPKAKTNFPIDSSSPPPPNLRFNQIRNQNQNQVDPFMDHRLFTDHQQQFPIVNRPTSSSMSSTVESFSGPRPTTMKPATTKRYPRTPPVVPEDCHSDCDSSSSVIDDDDDIASSSRRRNPPFQFDLNFPPLDCVDLFNGADDLHCTDLRL

SEQ ID NO: 390 - DNA, 923 bp, Arabidopsis thaliana
attccttcttgcctaggaactaattgttgcacacttcggtacacaattttttgagcacttcgacatcaaaacgagagagaaaagaatggtggattctcatggctccgacacggaatgttcctccaagaagaaaaaggagaaaacgaaagaaaagggggtatatcgtggggctcgcatgaggagctgggggaaatgggtctcggagattcgggagccccgtaagaaatcaagaatctggctcgggactttccccacggcggagatggcagcgcgtgcccatgatgttgcggcattgagtatcaaaggaagttccgcaatccttaacttccctgagctcgcggattttctgccaagaccagtctcgctcagccaacaggatatccaggccgcagccgccgaagccgctcttatggatttcaaaactgtaccattccatcttcaggatgactcaacgccgttgcaaactaggtgtgatactgagaagatcgaaaagtggtcatcctcatcgtcctcagcctcatcctcatcctcatcttcgtcctcgtcctcatcatctatgctttcgggggagctaggagatattgtggagttgccgagtcttgaaaacaatgtaaaatacgattgtgcgctgtatgactcgttggaggggctggtgtcgatgcccccatggttagatgctaccgaaaatgattttaggtatggagatgattcggtactgttggacccatgtctcaaagaaagctttttgtggaattatgagtaaggtttttttttggaaagaaatgtggttttttgtttcctcctctcttttatactttcgatctttttttctaagcatatatatcttctacatatgtaatacttttccattagtaaacaatgattcggtttcgggtacaaaaaaaaaaaaaaaaaaaaaaaaa

SEQ ID NO: 391 - protein, 225 aa, Arabidopsis thaliana
MVDSHGSDTECSSKKKKEKTKEKGVYRGARMRSWGKWVSEIREPRKKSRIWLGTFPTAEMAARAHDVAALSIKGSSAILNFPELADFLPRPVSLSQQDIQAAAAEAALMDFKTVPFHLQDDSTPLQTRCDTEKIEKWSSSSSSASSSSSSSSSSSSSMLSGELGDIVELPSLENNVKYDCALYDSLEGLVSMPPWLDATENDFRYGDDSVLLDPCLKESFLWNYE

SEQ ID NO: 392 - DNA, 1354 bp, Arabidopsis thaliana
gcctttttgactcttctttctctcttctactttttttcaggctctctctctatatctctatcttcttctccggttaactaaaagagaaatgaaaagccgagtgagaaaatccaagtacacggttcaccggaaaatcacatccacaccgttcgacggtttcccgaagattgtcaaaatcatagtcactgacccatgcgctactgattcttccagcgatgaggaaaacgacaacaaatctgttgctccgagggtgaaacgttatgtggatgagatcaggttctgtgacgaagatgacgaacctaaaccggcgaggaaagcgaagaaaaagtccccggcggctgcggcggagaacggtggagatttggtaaagtctgtggtgaagtatagaggagtgagacaacgaccttggggaaaatttgcggcggagattcgtgatccttcgagtcgtactagactctggcttgggacttttgcgacggcggaggaagctgctataggttacgatagagccgcgattcgaatcaaaggtcataacgctcagacgaattttctcactcctcctcctagtccgacgactgaggtgttaccggaaactccggtgattgaccttgaaactgtctctggttgtgattcggcgagggaatcgcaaatcagtctgtgttctccgacttctgttctccggtttagtcacaacgacgaaacagagtacagaacagagccaacggaagaacaaaatccgtttttcttgcctgatttgtttcgctccggagattatttttgggattccgaaattacccctgaccctttgtttctcgacgaattccaccagtccttgttaccaaacatcaacaacaacaacacagtgtgtgataaggatacgaatctgtctgatagttttccgttgggagtgatcggagatttcagctcatgggatgttgatgagtttttccaagatcatttgttggataagtaatttgatgagttcttccccagaatttttctgggtttctctttttggttgtgtgagtgagatgagtggtttgatgacaacgacggggatgaatcttagccgtccgttttccatttcgtggacggctccgatcagcggaagaagcgcaacggagtttttatttatctgtttgagaattttataatttaatttgcgagtaaatatagtaattagtgttaagattgtgagagtttaagttaattagggaggggttttgaatattggggattttgggaggtttttgtttggtttctctccaagtctgtcactatgcaaggaagcagtataaagaccgtatatatattttattattaatattgataaaagtaaaaaaaaaaaaaaaaa

SEQ ID NO: 393 - protein, 294 aa, Arabidopsis thaliana
MKSRVRKSKYTVHRKITSTPFDGFPKIVKIIVTDPCATDSSSDEENDNKSVAPRVKRYVDEIRFCDEDDEPKPARKAKKKSPAAAAENGGDLVKSVVKYRGVRQRPWGKFAAEIRDPSSRTRLWLGTFATAEEAAIGYDRAAIRIKGHNAQTNFLTPPPSPTTEVLPETPVIDLETVSGCDSARESQISLCSPTSVLRFSHNDETEYRTEPTEEQNPFFLPDLFRSGDYFWDSEITPDPLFLDEFHQSLLPNINNNNTVCDKDTNLSDSFPLGVIGDFSSWDVDEFFQDHLLDK

SEQ ID NO: 394 - DNA, 1368 bp, Arabidopsis thaliana
attcttcttctaaaaaatcttgacaactttttgtttttgttttctttctctgaattttttaaaagagagagagctatgtagctatgaaacagtaagagatatagatatagagagacagagaaagatgatgatcagtgaagttaggctaaacccactttctatttatgtataattaggtcaatcacatcaccaatctcctcctccaattctcctcctctccttccaaattctagggttttgcttgtatctcaccccctttctcaattccctagggaaactgtgaatttcatcaaattccattattttttggtcacacccttaaagagatctgagagttctaaagatgatgacagatttatctctcacgagagatgaagatgaagaagaagcaaagcccttagcagaagaagaaggagcgcgtgaagtagcagacagagagcacatgttcgacaaagttgtgactccaagtgatgtcggaaaactaaaccgacttgtgatcccaaagcaacacgcagagagattcttccctttagattcatcttcaaacgagaaaggtttgcttttaaacttcgaagatctcactggcaaatcttggaggttccgttactcttactggaacagtagtcaaagctatgtcatgactaaaggttggagcagattcgttaaagacaaaaagcttgacgccggagatattgtctctttccaaagatgtgtcggagattcaggaagagatagccgtttgtttattgattggaggagaagacctaaagtccctgaccatcctcatttcgccgccggagctatgttccctaggttttacagctttccttcgaccaattacagtctttataatcatcagcagcaacgtcatcatcacagtggtggtggttataattatcatcaaattccgagagaatttggttatggttacttcgttaggtcagtggatcagaggaacaatcctgcggctgcggtggctgatccgttggtgattgaatctgtgccggtgatgatgcacgggagagctaatcaggaacttgttggaacggccgggaagagactgaggctttttggagttgatatggaatgcggcgagagcggaatgaccaacagtacggaggaggaatcatcatcttccggtggaagtttgccacgtggaggcggtggtggtgcttcatcttcctctttctttcagctgagacttggaagcagcagtgaagatgatcacttcactaagaaaggaaagtcttcattgtcttttgatttggatcaataataatgatgatgatgaaattagttggtattttaagaaaaaaaacatacatatataattctatatatatgacaacataatgcattgatttcctt

SEQ ID NO: 395 - protein, 310 aa, Arabidopsis thaliana
MMTDLSLTRDEDEEEAKPLAEEEGAREVADREHMFDKVVTPSDVGKLNRLVIPKQHAERFFPLDSSSNEKGLLLNFEDLTGKSWRFRYSYWNSSQSYVMTKGWSRFVKDKKLDAGDIVSFQRCVGDSGRDSRLFIDWRRRPKVPDHPHFAAGAMFPRFYSFPSTNYSLYNHQQQRHHHSGGGYNYHQIPREFGYGYFVRSVDQRNNPAAAVADPLVIESVPVMMHGRANQELVGTAGKRLRLFGVDMECGESGMTNSTEEESSSSGGSLPRGGGGGASSSSFFQLRLGSSSEDDHFTKKGKSSLSFDLDQ

SEQ ID NO: 396 - DNA, 803 bp, Arabidopsis thaliana
cttgtttagggtttcaatctttacagatcttgtggcagaaaaaatcaagtcaaagcaagaaaaatggttagaggaaagatagagatgaagaaaatagaaaacgcaacgagtagacaagtgactttctcaaaaagaagaaatggtttgttgaagaaagcttatgagctctcagtactctgcgatgctcaactctctctcatcatcttctcccagagaggaaggctttatgaattctctagctctgatatgcagaagacgatcgaacgctaccgcaagtacacaaaagatcatgaaaccagcaatcacgactcacaaattcacttgcagcaattgaaacaagaagcaagccacatgataacaaagattgaactccttgagtttcacaagcggaagctattgggacaaggaattgcttcttgttctctagaagagcttcaagaaatcgatagtcaactccaaagaagtctgggaaaggtccgagaaagaaaggctcaattgttcaaggagcagttggagaaactaaaagcaaaggagaaacaattgttagaagagaacgtcaagttacatcaaaagaatgttattaatccatggagaggatcatcgactgatcagcagcaagagaaatacaaagttatagatttgaatttggaagttgaaactgacttattcatcggtttgccaaatagaaactgctagtaacattatataatatgtttatttatttatcatgaaatattcaaaatcattcaataaattgtgaggtaatgatttgggatagtaaaaaaaaaaaaaaaaaaaaaaaa

SEQ ID NO: 397 - protein, 210 aa, Arabidopsis thaliana
MVRGKIEMKKIENATSRQVTFSKRRNGLLKKAYELSVLCDAQLSLIIFSQRGRLYEFSSSDMQKTIERYRKYTKDHETSNHDSQIHLQQLKQEASHMITKIELLEFHKRKLLGQGIASCSLEELQEIDSQLQRSLGKVRERKAQLFKEQLEKLKAKEKQLLEENVKLHQKNVINPWRGSSTDQQQEKYKVIDLNLEVETDLFIGLPNRNC

SEQ ID NO: 398 - DNA, 1257 bp, Arabidopsis thaliana
cacaaaccacagtctctctttctctctctatctatcttctctttctctctctatctctatcactgaaacccaaagagatccaccatttgttcttttttccttcacacagagaactgttttcttccacacttcctttttactaggcagtgttaaccaattgagagagaaaaatgatggttgatgaaaatgtggaaaccaaggcctctactttagtggcaagtgttgatcatgggtttggatccgggtcgggtcatgatcatcatgggttatcggcgtctgtgcctcttcttggtgttaactggaagaagagaaggatgcctagacagagacgatcttcttcttcctttaaccttctctctttccctcctcctatgcctcctatttcccacgtgccaactcctctccccgcacgtaaaattgacccaagaaagctaagattcctcttccaaaaggaactcaagaacagtgacgtcagctctctccgacgtatgatactcccgaagaaagccgcggaggctcacttgccggcacttgaatgcaaggaagggattcctataagaatggaagatttggacggttttcacgtttggaccttcaagtataggtactggccaaacaacaatagcagaatgtacgtgctagaaaacacaggcgattttgtgaatgctcatggtctgcagctaggtgacttcatcatggtttaccaagatctctactcaaacaattacgttatacaagcaagaaaagcatcggaagaagaagaagtagacgtaatcaatcttgaagaagacgacgtttacacaaacttaacaaggatcgaaaacactgtggttaacgatcttctcctccaagattttaatcatcacaacaacaacaacaacaacaacagcaacagcaacagcaacaaatgttcttactattatccagtcatagatgatgtcaccacaaacacagagtcttttgtctacgacacgacggctcttacctccaacgatactcctctcgattttttgggtggacatacgacgactactaataattattactccaagttcggaacattcgatggtttgggctccgttgagaatatctctctcgatgacttctactagataatcaatcgatgggctcatggtattcttgatggtgatcagctatttaatatccttataatatatataagaattaaatgcaatttgcatatatattatcaagtgttgtaatataacattacagtttaaaaaaaaaaaaaaaaaa

SEQ ID NO: 399 - protein, 312 aa, Arabidopsis thaliana
MVDENVETKASTLVASVDHGFGSGSGHDHHGLSASVPLLGVNWKKRRMPRQRRSSSSFNLLSFPPPMPPISHVPTPLPARKIDPRKLRFLFQKELKNSDVSSLRRMILPKKAAEAHLPALECKEGIPIRMEDLDGFHVWTFKYRYWPNNNSRMYVLENTGDFVNAHGLQLGDFIMVYQDLYSNNYVIQARKASEEEEVDVINLEEDDVYTNLTRIENTVVNDLLLQDFNHHNNNNNNNSNSNSNKCSYYYPVIDDVTTNTESFVYDTTALTSNDTPLDFLGGHTTTTNNYYSKFGTFDGLGSVENISLDDFY

SEQ ID NO: 400 - DNA, 1301 bp, Arabidopsis thaliana
tctaagataaagaaactctcgacgacatcttgagaatcgaacgagaatgatccaaaatctgcaaaaattaccccaagacctccaatcctcggcaatgaagatgcctcctcccttttctgcgtcgaagactcaatacttgttccacgacgagtcatcggaaaactctaaaaagagtttggtctccacaactctttctttgtcgtcttgtgaaaaccctaataagaggaagatgaactctgacgaagttctcaatatttcttgcataccaagagactacaaattaacacaagtagaaagaaagattgcacgaatgaggaatctctcgtatcaagaaaaggcagaggacgaatggtacggtgtctcaacagaactaacactcttcaaggatccgtggatcatcaaaaaggtttttcactttgcttcagtcttggatatggctcccaactcagtctcaaatactcattgcttgttggacacggagtcaccagaaaacgctgaagagagtttggtctccctggatctgtgtttctatgacaaaacatggccacatgatcccaatgttgcttacaataaaccaacgtccgaagaagcaataaacctggcgtggatgaggactatgtcgaagagagcaagaaaagaagaggagaagtactacgtctcgacagaactaactctcctcaccgtcgctgacccatggaccttgaagatggcaatgaccaaaagcagtattggcaacctataccgtcttgttctaaaggcgagctttgtagacatccacattctgagatatctccctttggatgatcaaatgatggtcaaagaagactctggattagcagtcgaggtgtatgatcacgacactgactctgtgcacaatctggctcttaagaaatgggccaaatcttcaagctttgttctcgtcagcggatggcgtaagtgctttgtcgacagaagaggtttgcaggttggcgatgtgattggaatgtattgggatcgttctgaatctaagcttcatttttgtgtgctttctcgttccgaaacaatggattcagctcctcttcctccaagtccataggacctcactagctatggaggctctgcagagagattcttattttctttatgtaatcgtcaaacaagtgattggtgttgtttctgtttttttgttgttgtctcggtgttttggtttcatgtgtttttgttttttaagtataccggtgttgttttttatggtttcatgtggtttttatatgttttaagtgttaataaagaatcctgctctcattataagtaaaaaaaaa

SEQ ID NO: 401 - protein, 342 aa, Arabidopsis thaliana
MIQNLQKLPQDLQSSAMKMPPPFSASKTQYLFHDESSENSKKSLVSTTLSLSSCENPNKRKMNSDEVLNISCIPRDYKLTQVERKIARMRNLSYQEKAEDEWYGVSTELTLFKDPWIIKKVFHFASVLDMAPNSVSNTHCLLDTESPENAEESLVSLDLCFYDKTWPHDPNVAYNKPTSEEAINLAWMRTMSKRARKEEEKYYVSTELTLLTVADPWTLKMAMTKSSIGNLYRLVLKASFVDIHILRYLPLDDQMMVKEDSGLAVEVYDHDTDSVHNLALKKWAKSSSFVLVSGWRKCFVDRRGLQVGDVIGMYWDRSESKLHFCVLSRSETMDSAPLPPSP

SEQ ID NO: 402 - DNA, 813 bp, Arabidopsis thaliana
ctgttcacaagaaagctccccaaaaggagcgttgctttactctcctataaaaagaagctcttctacttcttctcgttaccacaaaactctttcaccgatcttctcgttccattcttcttcctaattacaccatgcccaacatcaccatgggtttgaaacccgacccggttgctccaacgaacccgactcatcatgagagtaatgctgccaaagagattcgttacagaggcgttaggaaacgtccatggggaagatacgccgctgagatccgagatccggttaagaaaactcgagtctggctcggtacgttcgacaccgctcagcaggcggcgcgtgcttacgacgcagccgcgcgtgactttcgtggtgttaaggctaagaccaatttcggtgttatcgttggtagtagtcctactcagagtagcaccgtcgtcgactctcccacggcggcacggtttataacacctccgcacctcgagctcagcttaggcggcggcggcgcgtgtcgtcgtaagatcccgcttgtgcatccggtttactactataacatggcgacgtatccaaagatgacgacgtgtggtgtccagagcgagtctgaaacgtcgtcggtcgttgatttcgaaggtggagctgggaagatatctccgccgttagatctggatcttaacttagctcctccggcggaataggccgtgagttttttttttcttatgtcgtttctttagacaaaaaaaaataacgtttcctttttttttctgcctaagaaaaaaatattatccgttttttagaagaaaaaaaaaaaaaaaaaaaaaa

SEQ ID NO: 403 - protein, 185 aa, Arabidopsis thaliana
MPNITMGLKPDPVAPTNPTHHESNAAKEIRYRGVRKRPWGRYAAEIRDPVKKTRVWLGTFDTAQQAARAYDAAARDFRGVKAKTNFGVIVGSSPTQSSTVVDSPTAARFITPPHLELSLGGGGACRRKIPLVHPVYYYNMATYPKMTTCGVQSESETSSVVDFEGGAGKISPPLDLDLNLAPPAE

SEQ ID NO: 404 - DNA, 874 bp, Arabidopsis thaliana
tttttcttttgattctgcttttttccgctaggtttctgagatcttccattcgtctcgaattaagttgctacgatgaaaacagcaaaggggaaagataaagttaagaccacaaaggaagccttgaagccagttgatgacagaaaggtgggaaagaggaaggcaccggctgagaagcctactaaacgagagactcgtaaagagaagaaggctaaaaaggacccaaacaaaccaaaaagagctcctagtgccttctttgtctttctagaagattttagggtcacgttcaagaaagaaaatccaaatgtgaaggccgtctctgctgttgggaaagctggagggcagaaatggaagtcaatgtctcaagctgaaaaagctccatatgaagagaaagctgcaaaaaggaaagctgaatatgagaagcaaatggatgcatacaacaaaaacttggaggaagggagtgatgaatctgaaaagtctagatctgagataaatgatgaagatgaagccagtggggaggaagaactattagagaaggaagcggcaggtgatgatgaagaagaagaagaggaagaagatgtcgatgatgatgacgacgaggaagaagactaaatcagggatagaaatcagattttgtatctcaagcttaactgcagatccttaagcagaagtaagtattttgtaatttgtgtgtggacgagaactatagatctaaaatcgtgtgtttttttgtttttcttttcctaagaaagcgaaacagttgttagcatctctcaggatgtctgtttcagctttttgccgcaacaaacaatgtatcaatgtctgcgttagtgatcatccaaaccaaaacataaactaatgaacatataaaaaaaaa

SEQ ID NO: 405 - protein, 178 aa, Arabidopsis thaliana
MKTAKGKDKVKTTKEALKPVDDRKVGKRKAPAEKPTKRETRKEKKAKKDPNKPKRAPSAFFVFLEDFRVTFKKENPNVKAVSAVGKAGGQKWKSMSQAEKAPYEEKAAKRKAEYEKQMDAYNKNLEEGSDESEKSRSEINDEDEASGEEELLEKEAAGDDEEEEEEEDVDDDDDEEED

SEQ ID NO: 406 - DNA, 903 bp, Arabidopsis thaliana
ccataataatatattaaaactatatactataatctttttacataataaactttgggtcctgcgtcttaatcatagtacttaattttctctgtgtgttttaatatgaataataaaactgaaatgggatcttccacaagtggaaattgctcgtcggtttcaaccactggtttagctaactccggttcagaatctgatctccggcaacgtgatctaatcgacgagcggaagagaaagaggaaacagtcgaacagagaatctgcgaggaggtcgaggatgaggaagcagaagcatttggatgatctcactgctcaggtgactcatctacgtaaagaaaacgctcagatcgtcgccggaatcgccgtcacgacgcagcactacgtcactatcgaggcggagaacgacattctcagagctcaggttcttgaacttaaccaccgtctccaatctcttaacgagatcgttgatttcgtcgaatcttcttcttcaggattcggtatggagaccggtcagggattattcgacggtggattattcgacggcgtgatgaatcctatgaatctagggttttataatcaaccaatcatggcttctgcttctactgctggtgatgttttcaactgttagaaaacttcacatcattatcatcgtgagtgagactaatcatcgcagcaggggtaaaactgtaatttttcttataaattatgtgatgatgctttgtttctttattttataagatggttaattagtgtttaaaactgattgtaatgatagacagtgtaagaaatgtgtgatatcatggagatggtgatgtgagtttggtacaaatattttaagatcttttctttctatatattaaaagtgaagaaataatattttgtcattttcttaaaaaaaaaaaaaaaa

SEQ ID NO: 407 - protein, 173 aa, Arabidopsis thaliana
MNNKTEMGSSTSGNCSSVSTTGLANSGSESDLRQRDLIDERKRKRKQSNRESARRSRMRKQKHLDDLTAQVTHLRKENAQIVAGIAVTTQHYVTIEAENDILRAQVLELNHRLQSLNEIVDFVESSSSGFGMETGQGLFDGGLFDGVMNPMNLGFYNQPIMASASTAGDVFNC

SEQ ID NO: 408 - DNA, 567 bp, Arabidopsis thaliana
atgattagacatctaaaaccctacatggagtcgtctagtgtccatcgctctcattgtttcgatattcttgatggagtcccactacacgacgatcatttcaactcggcattcctaccaaacactgactttaatgttcatttgcagtcaaacgtatcgacccgcatcaacaatcagtctcacttagacccaaatgcagaaaacattttccataacgaaggtcttgctccagaagaaagaagagcaagaagaatggtctctaaccgggaatctgcaaggaggtcacgtatgcgcaaaaagaagcagatcgaagagctgcaacaacaagttgaacaactcatgatgttgaatcatcacttgtctgagaaagtcatcaacttgttggaaagcaaccatcagatcctacaagagaactcacagctgaaagagaaagtctcttcctttcacttgctcatggcagatgtgctattacccatgagaaatgcagagagcaacatcaatgaccgcaatgtgaattatctaagaggagaaccatcaaaccgtcccaccaacagtccctttggtaagtaa

SEQ ID NO: 409 - protein, 188 aa, Arabidopsis thaliana
MIRHLKPYMESSSVHRSHCFDILDGVPLHDDHFNSAFLPNTDFNVHLQSNVSTRINNQSHLDPNAENIFHNEGLAPEERRARRMVSNRESARRSRMRKKKQIEELQQQVEQLMMLNHHLSEKVINLLESNHQILQENSQLKEKVSSFHLLMADVLLPMRNAESNINDRNVNYLRGEPSNRPTNSPFGK

SEQ ID NO: 410 - DNA, 725 bp, Arabidopsis thaliana
ctaactttcttcccaagtaaacttcaaaatgcagccgcaaacagacgttttcagcctccataactacctaaactcatcgatactgcagtctccgtatccttctaatttcccgatatctacgccatttccaaccaacggtcaaaacccgtacctcctctacggattccaaagccctacaaacaatccacaatccatgagcctaagcagcaacaactcaacatcagatgaagcagaagagcagcagacgaacaacaatataatcaacgagcggaagcagagaaggatgatttcaaaccgagaatccgcaaggagatcgcgtatgaggaagcaaagacaccttgacgagctttggtcacaagtgatgtggttaaggatcgagaatcatcagttgcttgataagcttaacaatctctctgagtctcacgacaaggttcttcaagagaatgctcagcttaaagaagaaacatttgagcttaagcaagtgatcagcgatatgcaaattcaaagccctttctcttgctttagagacgatataatccccattgaataaagcatttttccccgattcatatttatgaaaattttcttcaagagtatgtttctttgtatgtatatgtggagatgtatttcagggttttgataatatgaccctttacgacgacgtttttagattgtagtaaatttataaactaaagaagattagtgttaatgaagaacaaatataa

SEQ ID NO: 411 - protein, 173 aa, Arabidopsis thaliana
MQPQTDVFSLHNYLNSSILQSPYPSNFPISTPFPTNGQNPYLLYGFQSPTNNPQSMSLSSNNSTSDEAEEQQTNNNIINERKQRRMISNRESARRSRMRKQRHLDELWSQVMWLRIENHQLLDKLNNLSESHDKVLQENAQLKEETFELKQVISDMQIQSPFSCFRDDIIPIE

SEQ ID NO: 412 - DNA, 1148 bp, Arabidopsis thaliana
gttaaagaagatggatgggccacaagttgctatataaatccttccacttcttgttgtatactattgcttgagttctgattgggcacagtagtaccattgccatttctctcacacataccgtctctttctctcatcatcaatcatcaatcatccaaaagaaaaaaccctaaaatttcacttgtaagcttttcaccagtttctctccatacccattttatcagcttctccatatctttctctatggattctgacataatgaacatgatgatgcatcagatggagaagcttcctgagttttgtaaccctaattcctctttcttctctcccgaccacaacaacacttacccttttctctttaactccactcattaccagtccgatcactcaatgaccaacgaaccaggtttccgctacggttccggtttactcactaacccttcttctatctctcccaacacagcttactcttccgtttttcttgacaaaagaaacaacagtaacaacaacaataatggcacgaacatggcagctatgcgagagatgatcttccgtatcgccgtgatgcaaccgatccatatcgatcccgaggcggttaagccaccgaagaggaggaacgtcaggatctctaaagatcctcaaagcgtggcggctaggcatagaagggagagaataagcgagaggattcggattttgcaacggcttgttcctggtgggacgaagatggatacagcttcgatgctcgatgaagcaattcattatgtgaagtttttaaagaaacaggtgcagtctctggaggagcaggcggtggttactggcggagggggaggaggaggaggaagggttttgatcggtggaggtggaatgacggcggcgagtggtggtggtggcggcgggggagtggttatgaaagggtgtggaacagtggggactcatcagatggtgggcaatgcacagattcttagatgatgatgatttttaattttattattattatattaatgttggagaaaaagagaaaaatgattctggagagggaagccaagtaatttatgtgagagtctttaatttaactttattttcttgtttagataatgtgtaatgatggtttttaaagccaaagactctccatggttgttggagcgagtttg

SEQ ID NO: 413 - protein, 241 aa, Arabidopsis thaliana
MDSDIMNMMMHQMEKLPEFCNPNSSFFSPDHNNTYPFLFNSTHYQSDHSMTNEPGFRYGSGLLTNPSSISPNTAYSSVFLDKRNNSNNNNNGTNMAAMREMIFRIAVMQPIHIDPEAVKPPKRRNVRISKDPQSVAARHRRERISERIRILQRLVPGGTKMDTASMLDEAIHYVKFLKKQVQSLEEQAVVTGGGGGGGGRVLIGGGGMTAASGGGGGGGVVMKGCGTVGTHQMVGNAQILR

SEQ ID NO: 414 - DNA, 1473 bp, Arabidopsis thaliana
tctcaagcttctctctcctttttttcccatagcacatcagaatcgctaaatacgactcctatgcaaagaagaagctacttctttctcttgccctaattaatctacctaactagggtttcctcttacctttcatgagagagatcatttaacataagtcaccttttttatatcttttgcttcgtctttaatttagttctgttcttggtctgtttctatattttgtcggcttgcgtaaccgatcacaccttaatgctttagctattgtttcctcaaaatcatgagttttgacttctcgatctgagttttctttttctctctttacgctcttcttcacctagctaccaatatatgaacgagcaggatcaagaatcgagaaattgatttgagctggcgaataagcagtggtgggatagggaattagtagatgcggcggcgatggaaggcggttacgagcaaggcggtggagcttctagatacttccataacctctttagaccggagattcaccaccaacagcttcaaccgcagggcgggatcaatcttatcgaccagcatcatcatcagcaccagcaacatcaacaacaacaacaaccgtcggatgattcaagagaatctgaccattcaaacaaagatcatcatcaacagggtcgacccgattcagacccgaatacatcaagctcagcaccgggaaaacgtccacgtggacgtccaccaggatctaagaacaaagccaagccaccgatcatagtaactcgtgatagccccaacgcgcttagatctcacgttcttgaagtatctcctggagctgacatagttgagagtgtttccacgtacgctaggaggagagggagaggcgtctccgttttaggaggaaacggcaccgtatctaacgtcactctccgtcagccagtcactcctggaaatggcggtggtgtgtccggaggaggaggagttgtgactttacatggaaggtttgagattctttcgctaacggggactgttttgccacctcctgcaccgcctggtgccggtggtttgtctatatttttagccggagggcaaggtcaggtggtcggaggaagcgttgtggctccccttattgcatcagctccggttatactaatggcggcttcgttctcaaatgcggttttcgagagactaccgattgaggaggaggaagaagaaggtggtggtggcggaggaggaggaggaggagggccaccgcagatgcaacaagctccatcagcatctccgccgtctggagtgaccggtcagggacagttaggaggtaatgtgggtggttatgggttttctggtgatcctcatttgcttggatggggagctggaacaccttcaagaccacctttttaattgaattttaatgtccggaaatttatgtgtttttatcatcttgaggagtcgtctttcctttgggatatttggtgtttaatgtttagttgatatgcatatttt

SEQ ID NO: 415 - protein, 311 aa, Arabidopsis thaliana
MEGGYEQGGGASRYFHNLFRPEIHHQQLQPQGGINLIDQHHHQHQQHQQQQQPSDDSRESDHSNKDHHQQGRPDSDPNTSSSAPGKRPRGRPPGSKNKAKPPIIVTRDSPNALRSHVLEVSPGADIVESVSTYARRRGRGVSVLGGNGTVSNVTLRQPVTPGNGGGVSGGGGVVTLHGRFEILSLTGTVLPPPAPPGAGGLSIFLAGGQGQVVGGSVVAPLIASAPVILMAASFSNAVFERLPIEEEEEEGGGGGGGGGGGPPQMQQAPSASPPSGVTGQGQLGGNVGGYGFSGDPHLLGWGAGTPSRPPF

SEQ ID NO: 416 - DNA, 1295 bp, Arabidopsis thaliana
tcgaccagcttggatttcgttgttcatcattactactctctttcttcttctagctagctagttttgacagcaaaataagaagcaaaaaaaaggtcaactaaaaaagatctgttcttagatcactctcttcttctttttttgatccaattccaccattgaatcatagatcatggatccagtacaatctcatggatcacaaagctctctacctcctcctttccacgcaagagactttcaattacatcttcaacaacagcaacaagagttcttcctccaccatcaccagcaacaaagaaaccaaaccgatggtgaccaacaaggaggatcaggaggaaaccgacaaatcaagatggatcgtgaagagacaagcgacaacatagacaacatagctaacaacagcggtagtgaaggtaaagacatagatatacacggtggttcaggagaaggaggtggtggctccggaggagatcatcagatgacaagaagaccaagaggaagaccagcgggatccaagaacaaaccaaaaccaccgattatcatcacacgggacagcgcaaacgcgcttagaacccacgtgatggagatcggagatggctgcgacttagtcgaaagcgttgccacttttgcacgaagacgccaacgcggcgtttgcgttatgagcggtactggaaatgttactaacgtcactatacgtcagcctggatctcatccttctcctggctcggtagttagtcttcacggaaggttcgagattctatctctctcaggatcttttctccctcctccggctcctcctacagccaccggattgagtgtttacctcgctggaggacaaggacaggtggttggaggaagcgtagttggtccgttgttatgtgctggtcctgtcgttgtcatggctgcgtcttttagcaatgcggcgtacgaaaggttgcctttagaggaagatgagatgcagacgccggttcatggcggaggaggaggaggatcattggagtcgccgccaatgatgggacaacaactgcaacatcagcaacaagctatgtcaggtcatcaagggttaccacctaatcttcttggttcggttcagttgcagcagcaacatgatcagtcttattggtcaacgggacgaccaccgtattgatcaaatatacacacacactcataatcgttgctagctagctaacgatgaatcatgagtttagtggatatatatatgattaaaagaggttagcttatgaacattaataagagtttggattctatcgagcttcattatgtttgggtcatcgttc

SEQ ID NO: 417 - protein, 324 aa, Arabidopsis thaliana
MDPVQSHGSQSSLPPPFHARDFQLHLQQQQQEFFLHHHQQQRNQTDGDQQGGSGGNRQIKMDREETSDNIDNIANNSGSEGKDIDIHGGSGEGGGGSGGDHQMTRRPRGRPAGSKNKPKPPIIITRDSANALRTHVMEIGDGCDLVESVATFARRRQRGVCVMSGTGNVTNVTIRQPGSHPSPGSVVSLHGRFEILSLSGSFLPPPAPPTATGLSVYLAGGQGQVVGGSVVGPLLCAGPVVVMAASFSNAAYERLPLEEDEMQTPVHGGGGGGSLESPPMMGQQLQHQQQAMSGHQGLPPNLLGSVQLQQQHDQSYWSTGRPPY

SEQ ID NO: 418 - DNA, 1084 bp, Arabidopsis thaliana
tttgtgtttggtgctggcatggctggtctcgatctaggcacaacttctcgctacgtccacaacgtcgatggtggcggcggcggacagttcaccaccgacaaccaccacgaagatgacggtggcgctggaggaaaccaccatcatcaccatcataatcataatcaccatcaaggtttagatttaatagcttctaatgataactctggactaggcggcggtggaggaggagggagcggtgacctcgtcatgcgtcggccacgtggccgtccagctggatcgaagaacaaaccgaagccgccggtgattgtcacgcgcgagagcgcaaacactcttagggctcacattcttgaagttggaagtggctgcgacgttttcgaatgtatctccacttacgctcgtcggagacagcgcgggatttgcgttttatccgggacgggaaccgtcactaacgtcagcatccgtcagcctacggcggccggagctgttgtgactctgcggggtacttttgagattctttccctctccggatcttttcttccgccacctgctcctccaggggcgactagcttgacgatattcctcgctggagctcaaggacaggtcgtcggaggtaacgtagttggtgagttaatggcggcggggccggtaatggtcatggcagcgtcttttacaaacgtggcttacgaaaggttgcctttggacgagcatgaggagcacttgcaaagtggcggcggcggaggtggagggaatatgtactcggaagccactggcggtggcggagggttgcctttctttaatttgccgatgagtatgcctcagattggagttgaaagttggcaggggaatcacgccggcgccggtagggctccgttttagcaatttaagaaactttaattgttttttccacttttttgtttttctccgaattttatgaaattatgatttaagaaaaaaaacgatattgttcatgtattgaccctcttactgcatggtttcttctattgggttaattggctagctcataagaattgtttaatttggttattgtcatcaaatttgcccacatataaagcttctagcaaat

SEQ ID NO: 419 - protein, 285 aa, Arabidopsis thaliana
MAGLDLGTTSRYVHNVDGGGGGQFTTDNHHEDDGGAGGNHHHHHHNHNHHQGLDLIASNDNSGLGGGGGGGSGDLVMRRPRGRPAGSKNKPKPPVIVTRESANTLRAHILEVGSGCDVFECISTYARRRQRGICVLSGTGTVTNVSIRQPTAAGAVVTLRGTFEILSLSGSFLPPPAPPGATSLTIFLAGAQGQVVGGNVVGELMAAGPVMVMAASFTNVAYERLPLDEHEEHLQSGGGGGGGNMYSEATGGGGGLPFFNLPMSMPQIGVESWQGNHAGAGRAPF

SEQ ID NO: 420 - DNA, 1342 bp, Arabidopsis thaliana
attttagtcttcctataacttcttctcaatcctctctcatatcttttttcttagtttaaatttcaataaaatagaaaaaaacatatacaaatctacagagaagagaagctttattttaatcttgtgtgtgtgtgtgtgttttatataatttttattttttttcaaattaaaatctcttctttgcttttgatgtgggcatggctggtcttgatctaggcacagcttttcgttacgttaatcaccagctccatcgtcccgatctccaccttcaccacaattcctcctccgatgacgtcactcccggagccgggatgggtcatttcaccgtcgacgacgaagacaacaacaacaaccatcaaggtcttgacttagcctctggtggaggatcaggaagctctggaggaggaggaggtcacggcgggggaggagacgtcgttggtcgtcgtccacgtggcagaccaccgggatccaagaacaaaccgaaacctccggtaattatcacgcgcgagagcgcaaacactctaagagctcacattcttgaagtaacaaacggctgcgatgttttcgactgcgttgcgacttatgctcgtcggagacagcgagggatctgcgttctgagcggtagcggaacggtcacgaacgtcagcatacgtcagccatctgcggctggagcggttgtgacgctacaaggaacgttcgagattctttctctctccggatcgtttcttcctcctccggcacctcccggagcaacgagtttgacaattttcttagccggaggacaaggtcaggtggttggaggaagcgttgtgggtgagcttacggcggctggaccggtgattgtgattgcagcttcgtttactaatgttgcttatgagagacttcctttagaagaagatgagcagcagcaacagcttggaggaggatctaacggcggaggtaatttgtttccggaggtggcagctggaggaggaggaggacttccgttctttaatttaccgatgaatatgcaaccaaatgtgcaacttccggtggaaggttggccggggaattccggtggaagaggtcctttctgatgtgtatatattgataatcattatatatataccggcggagaagcttttccggcgaagaatttgcgagagtgaagaaaggttagaaaagcttttaatggactaatgaatttcaaattatcatcgtgatttcggacattgtcttgttcatcatgttaagcttaggtttattttttgtcgtttgtagaattttatgtttgaatccttttttttttctgtgaaactctattgtgttcgtctgcgaaggaaaaaaaaattctcaaaaaaaa

SEQ ID NO: 421 - protein, 292 aa, Arabidopsis thaliana
MAGLDLGTAFRYVNHQLHRPDLHLHHNSSSDDVTPGAGMGHFTVDDEDNNNNHQGLDLASGGGSGSSGGGGGHGGGGDVVGRRPRGRPPGSKNKPKPPVIITRESANTLRAHILEVTNGCDVFDCVATYARRRQRGICVLSGSGTVTNVSIRQPSAAGAVVTLQGTFEILSLSGSFLPPPAPPGATSLTIFLAGGQGQVVGGSVVGELTAAGPVIVIAASFTNVAYERLPLEEDEQQQQLGGGSNGGGNLFPEVAAGGGGGLPFFNLPMNMQPNVQLPVEGWPGNSGGRGPF

SEQ ID NO: 422 - DNA, 531 bp, Arabidopsis thaliana
atgggttatccggtggggtacactgagctcctcctcccaagaatcttccttcacttactctctctcttaggcttaatacgaacactcatagacacgggttttcggatattgggtctacccgactttctcgaatccgacccggtttcatcgtcatcgtcatggctggaaccaccgtatatgtccacggcggcgcatcatcaccaagaaagctcatttttcttcccagtggcggcgaggctagctggagaaatcttgcccgtcatcagattctcggagctaactcgacccggattcggatccggatccgattgctgcgcggtgtgcctccacgagttcgagaacgatgacgagatccgacggctgacgaattgtcaacacatatttcaccggagctgtttagaccgttggatgatgggttataatcagatgacgtgtccactttgtagaacgccgtttatttctgatgagttacaagttgcttttaaccaacgagtttggtctgaatctgaacttctcgcagaatcaaattag

SEQ ID NO: 423 - protein, 176 aa, Arabidopsis thaliana
MGYPVGYTELLLPRIFLHLLSLLGLIRTLIDTGFRILGLPDFLESDPVSSSSSWLEPPYMSTAAHHHQESSFFFPVAARLAGEILPVIRFSELTRPGFGSGSDCCAVCLHEFENDDEIRRLTNCQHIFHRSCLDRWMMGYNQMTCPLCRTPFISDELQVAFNQRVWSESELLAESN

SEQ ID NO: 424 - DNA, 1114 bp, Arabidopsis thaliana
agagtgagaagctcaggatgtcaagcagtcgaaatacccactggtgtcacagatgtcagcgtgctgtccgccttcacggccaagagcctgtatgcttttattgcggaggtggatttgttgaagaacttgatatggctcaagccagcccctttgatatgtttagatcccacaggggtgttgtagaacgtgatcagacttttgatctcatggatgctttctctgtgtttatgaggaaccgcttagctgaaaggagccacgacagagaaatcagaggaagaaccatcagttcaggtcctgaaaactttcctggtctggcccctttgttgatctttggtggtcaagtcccttatagactaactggcgacaatgcagtcgaagccctcttcaatggcggctcccctggcattggcatcacacgtggtaacaccggcgactacttcttcggtcccggccttgaagaattgttcgagcagctttcagctggcactactcgccgaggcccaccacccgcaccgagatcagcaatagacgcattgccaactatcaagatcgcgcagaggcatcttaggtcatcggactcgaattgtcccgtgtgcaaagacgaattcgaactgggatcagaagcgaaacagatgccgtgtaaccacatctatcattctgactgcattgtcccgtggctggttcagcacaactcttgcccggtctgtcgccaagagctaccatcagctagcggaccttcaagcagtcaaaacagaaccacccctaccagaaactacagaagcagtagtagtagtagtagtagtaacagtcgtgagaacgggaatgaaagaaggaatcctttctcttccttctggccattccgttcgtcaggttcaagctcaagctccactcaaaaccgtggaggcacaagaaactcggatacaagcgatgagaaccataactaccatcaacagcaacatcaacaatcatatatgggttacagtggctggccttttgattactaaaagtctaaaagtgagctaaaacaaatctttggtctcactttggtctctttacttaaatatgcttgtgattctgcatatgccttgtgcttcactctctatctctctcactc

SEQ ID NO: 425 - protein, 328 aa, Arabidopsis thaliana
MSSSRNTHWCHRCQRAVRLHGQEPVCFYCGGGFVEELDMAQASPFDMFRSHRGVVERDQTFDLMDAFSVFMRNRLAERSHDREIRGRTISSGPENFPGLAPLLIFGGQVPYRLTGDNAVEALFNGGSPGIGITRGNTGDYFFGPGLEELFEQLSAGTTRRGPPPAPRSAIDALPTIKIAQRHLRSSDSNCPVCKDEFELGSEAKQMPCNHIYHSDCIVPWLVQHNSCPVCRQELPSASGPSSSQNRTTPTRNYRSSSSSSSSNSRENGNERRNPFSSFWPFRSSGSSSSSTQNRGGTRNSDTSDENHNYHQQQHQQSYMGYSGWPFDY

SEQ ID NO: 426 - DNA, 909 bp, Arabidopsis thaliana
atggtgcagcctggaaccgagataaaagcaagcgacctaaccctactagtaatcacgattatactcttcgcaatcttcatcgttggcttggcttcggtttgcttccgctggacctctcgccaattttactcacaagaatccatcaaccctttcactgactccgacgttgaatcccgtacgagtattacggcggtgcgtgggctcgacgaggctatcatcaactcatttccgacgtttctctactcggaggtgaaggagcggagaatcgggataggtggcgtcgagtgtgcagtgtgtatctgtgagttcgaagaccatgaaacgctccgtttgatgcctgaatgctgccacgtgtttcatgctgattgtgtaagtgtctggctctctgatcactccacgtgtccactctgtcgtgtggatctttgcttacaaccgggtgagagaagctacttgaatccggaaccggatcttgtagaatctacaaactcgcatttgtttgatggtgtgacgtggaccaataggaacagaccgtctcggtcatggtcaacgagattgtctcaatgtcgagtctcccagatattaatctcgagatcgcattcgaccggacattctgtggttcaaccgctagataatttagaccggtttacgcttcggttaccagaagaagtccggaggcaactgacgaaaaaaacggtggacaacgtggcattttctcaggctaggagctcacggcgtggttacagaagcagaagtgccggaagcgagaggagtgtcttctcgtaccaacggcggatgcattccttctctgattgtgcatggtccacctcctgtggcggagaagcggtggctccgtcaaaggattcccgccgaatatcagttgaacaatcccagctagatgatcgagtgtag

SEQ ID NO: 427 - protein, 302 aa, Arabidopsis thaliana
MVQPGTEIKASDLTLLVITIILFAIFIVGLASVCFRWTSRQFYSQESINPFTDSDVESRTSITAVRGLDEAIINSFPTFLYSEVKERRIGIGGVECAVCICEFEDHETLRLMPECCHVFHADCVSVWLSDHSTCPLCRVDLCLQPGERSYLNPEPDLVESTNSHLFDGVTWTNRNRPSRSWSTRLSQCRVSQILISRSHSTGHSVVQPLDNLDRFTLRLPEEVRRQLTKKTVDNVAFSQARSSRRGYRSRSAGSERSVFSYQRRMHSFSDCAWSTSCGGEAVAPSKDSRRISVEQSQLDDRV

SEQ ID NO: 428 - DNA, 1407 bp, Arabidopsis thaliana
gacagactctctctgtatgtgtgcgagaagcgagaagcgagagagagagagagagagttgttagctcacacgctttctctattttctcggaattcacaaaacagaaagtttcatcctttacgagaattaagccgaaagaaacaatctttgagtttgatttcttcttccttccttctctctctctgctctaatggattccagagacatcccaccgtcacataaccagcttcaaccaccaccgggaatgttaatgtctcattaccgtaaccctaacgccgccgcttcaccattaatggttcccacttccacatctcaaccgattcaacaccctcgtcttccttttggcaatcaacaacaatctcaaacgtttcatcagcagcaacaacaacaaatggatcagaagactcttgaatctcttggatttggtgatggatcaccttcttctcaaccgatgcgattcgggatcgatgatcagaatcagcaactgcaagtgaagaagaagcgaggaaggccgagaaagtatactcctgatggtagcattgctttaggtttagctcctacgtctcctcttctctctgcagcttctaattcttacggtgagggtggtgttggagatagtggtggaaatggaaactctgttgatccacctgttaaacgtaacagaggaaggcctcctggttctagtaagaaacagcttgatgctttaggaggaacttcaggagttgggtttacacctcatgtcattgaagtgaacacaggagaggacatagcgtcaaaggtgatggctttttcggatcaagggtcaagaacaatttgtattctctctgcaagtggtgcagtttctagagtgatgcttcgtcaagcttctcattctagtggaatcgttacttatgagggacgatttgagatcattactctctcaggctcagtcttgaattatgaggtaaatggttccaccaacagaagtggtaacttgagtgtggctttggctggacctgatggcggcatcgtaggtggcagtgtagttggtaatctagtagctgcaacacaagtccaggtgatagtgggaagctttgttgcagaagcaaagaaaccgaaacaaagtagtgttaacattgctcgggggcagaatcctgaaccggcttcagcgccggctaacatgttgaactttggatcagtctctcaaggaccatcgagcgagtcatcagaagagaatgagagcggttctcctgcaatgcaccgtgacaataataatgggatatatggagctcaacaacaacaacaacaacaacctcttcatcctcatcagatgcaaatgtaccaacatctttggtctaatcatggtcaataaaatgaagcggaaattaatttgtttccgttttggttacggttatggtttgatttctt

SEQ ID NO: 429 - protein, 386 aa, Arabidopsis thaliana
MDSRDIPPSHNQLQPPPGMLMSHYRNPNAAASPLMVPTSTSQPIQHPRLPFGNQQQSQTFHQQQQQQMDQKTLESLGFGDGSPSSQPMRFGIDDQNQQLQVKKKRGRPRKYTPDGSIALGLAPTSPLLSAASNSYGEGGVGDSGGNGNSVDPPVKRNRGRPPGSSKKQLDALGGTSGVGFTPHVIEVNTGEDIASKVMAFSDQGSRTICILSASGAVSRVMLRQASHSSGIVTYEGRFEIITLSGSVLNYEVNGSTNRSGNLSVALAGPDGGIVGGSVVGNLVAATQVQVIVGSFVAEAKKPKQSSVNIARGQNPEPASAPANMLNFGSVSQGPSSESSEENESGSPAMHRDNNNGIYGAQQQQQQQPLHPHQMQMYQHLWSNHGQ

SEQ ID NO: 430 - DNA, 1556 bp, Arabidopsis thaliana
atggaggagagagaaggaactaacatcaacaacatcccaaccagttttggtctgaaacaacatgaaactcctcttcctcctcctggttacccaccacggtctgaaaaccctaatctttttccggtgggtcaatccagcacttcctccgccgccgccgcggtgaaaccttctgagaatgttgctcctccttttagcttaacaatgccggtggagaattcttcttctgagttgaagaagaagagagggagaccaagaaagtataaccctgacggctcactcgctgtgactctctctcctatgcctatctcatcctccgttccgttgacgtcggagtttggttctcggaaacgaggaagaggtcgaggaagaggcagaggaagaggacgaggacgtggacaaggacaaggaagcagagagcccaataacaacaacaacgacaacaattggctcaagaatcctcagatgttcgaatttaacaacaacactcctacttctggtggaggaggacctgctgaaattgtcagtccaagttttacacctcatgtgctcacagtaaatgccggtgaggatgtgacaatgaagataatgacattctctcaacaaggctcgcgtgctatttgtattctttcagcgaacggtcccatatccaatgttacacttcgtcaatctatgacatctggtggtactctcacttatgagggtcattttgagattctttctttgacgggttcgtttataccaagcgagagtggaggaacccgaagcagagctggtgggatgagtgtctctcttgcaggacaagatggtcgtgtctttggtggtggacttgctggtctctttattgccgctggtcctgttcaggtaatggtagggagttttatagcgggtcaggaggaatcgcagcagcagcagcagcagataaagaagcaaagaagggaaagactcgggatcccgacaacaacacaagcttctaatatctcattcggtggctcagcggaagatcctaaggctagatacgggctcaacaagcctgttgttattcagccaccaccggtgtctgcaccacctgtgtccttttcgcatgaaccaagtactaacaccgtccatggttactatgcaaataacacagctaaccatatcaaggatctcttctcttccctccctggagaagatagggaagaagatgaggatgatttagaaggtgaagatgatgaagaattcggaggccatagcgaatctgacaccgaggttccaagctgatgatcgatggaaagaatccgacatatatgtgttatgaatcttgagttgttttatttcggtgtcttcagatttttttagagcgtaatggtattttttttctttcagattgttagttgttaaagtcttaaacagagatatttcactaaaagttagggtttactagaggatgtaatctttagggttctttgacttgtgtctttcttttaatcctcagatggttgttgtaggcttgtagccaatcttagtgtgtgttcaaactctctccttcaatcaaactccccaatgacttcattttg

SEQ ID NO: 431 - protein, 419 aa, Arabidopsis thaliana
MEEREGTNINNIPTSFGLKQHETPLPPPGYPPRSENPNLFPVGQSSTSSAAAAVKPSENVAPPFSLTMPVENSSSELKKKRGRPRKYNPDGSLAVTLSPMPISSSVPLTSEFGSRKRGRGRGRGRGRGRGRGQGQGSREPNNNNNDNNWLKNPQMFEFNNNTPTSGGGGPAEIVSPSFTPHVLTVNAGEDVTMKIMTFSQQGSRAICILSANGPISNVTLRQSMTSGGTLTYEGHFEILSLTGSFIPSESGGTRSRAGGMSVSLAGQDGRVFGGGLAGLFIAAGPVQVMVGSFIAGQEESQQQQQQIKKQRRERLGIPTTTQASNISFGGSAEDPKARYGLNKPVVIQPPPVSAPPVSFSHEPSTNTVHGYYANNTANHIKDLFSSLPGEDREEDEDDLEGEDDEEFGGHSESDTEVPS

SEQ ID NO: 432 - DNA, 1150 bp, Arabidopsis thaliana
tcgactcctctcctgattgcttcaccttcttctttactacaggtttcagctcctcaatgtccatggattgcttaagctacttctttaactacgatcctcctgtccagctccaggattgctttattcccgagatggatatgattatccctgaaaccgatagtttcttcttccaatctcaaccgcaactggagtttcatcagccattgtttcaagaagaagctccttcacagacccactttgaccctttctgcgaccagtttctttctccgcaagaaatctttctccctaaccctaaaaacgaaatcttcaacgaaacacacgacctcgatttctttctccccacgccaaaacgccagagacttgttaactccagctacaattgtaacactcaaaaccatttccagagccgtaacccgaatttcttcgaccctttcggcgacactgatttcgttccagaatcttgtaccttccaggagtttcgagttccggatttctctttagctttcaaggtaggccggggagatcaagatgactcaaagaaaccgacgctttcatctcagagcatcgcggctagagggaggagaagaagaattgcagagaagactcacgagctcggaaaactcatccccggtggcaataaacttaacaccgccgagatgttccaagccgccgctaagtatgtcaagtttttgcagagtcaagttgggattctccaactgatgcagaccacaaagaaggtaataaccaaccccaaataagaactttatcatccaattgaaactctaatcgtgttttctcacaagcttcttaatttgtttacgcagggtagctctaatgtgcaaatggaaactcagtatttgcttgaatcgcaagcaatccaggagaagttatcaacagaggaagtgtgtttggtaccgtgtgaaatggttcaagatctaacaactgaagaaaccatttgcagaaccccgaatatttctcgagaaatcaacaagttactgtctaaacatctggctaactagttttagtttcaagcctgaagttctctatgcctaaatttgtgtctgttatcgttgttttgtcttcttagttagtgttttgtcttgttgatttaggggctaattatcctggttaatctcctcttaactgggaa

SEQ ID NO: 433 - protein, 233 aa, Arabidopsis thaliana
MSMDCLSYFFNYDPPVQLQDCFIPEMDMIIPETDSFFFQSQPQLEFHQPLFQEEAPSQTHFDPFCDQFLSPQEIFLPNPKNEIFNETHDLDFFLPTPKRQRLVNSSYNCNTQNHFQSRNPNFFDPFGDTDFVPESCTFQEFRVPDFSLAFKVGRGDQDDSKKPTLSSQSIAARGRRRRIAEKTHELGKLIPGGNKLNTAEMFQAAAKYVKFLQSQVGILQLMQTTKKVITNPK

SEQ ID NO: 434 - DNA, 1311 bp, Arabidopsis thaliana
tacttcagacttctactcaaaccagtcacgtagttggttggtgacatttcgctgcatttttcaatctgtgattgtttttcgttcgtctttcttttactattttctcgaaaaggacacaagaagtattgcattcactcagttgagcaacttaacaatcgtgttgtactttttgaagttcccttgagctaaactgctaagagcatgcctctggataagaggcaacgggatttgcctctgggcttaagtcctcaagcttgcttcaaggatatagtaggtcggtctgtccttcctagaattcctctccctgagcttgggaaactatatgcagctaagcttcaggctcgctgtttgcagccaccaccattccagtctttgctgtgcagtcatgataaggagtcttatggaaaaagattctcacggtctgacatgcggtcttggtgcgctgctgctactactactactactccacttggagcattagagtcttctcagaaaagacttttgatattcgatcagtcaggagaccagactcgtctattacaatgtccatttcctctacggtttccatctcatgcggctgcagaaccagtgaaactctctgagttacaaggtatagagaaagctttcaaagaagatggtgaagagtttcacaagagtgatggaacagagtcagaaatgcatgaagacactgaggagatcaatgcattgctatattcagatgatgattatgatgatgattgcgagagtgatgatgaagtaatgagcactggtcactctccttatccaaatgaaggagtttgcaacaaaagggaattagaagaaatcgatggtccttgtaaaaggcagaaactactggataaggtcaacaacatcagcgacttatcatcacttgtgggcactgagagctccacacaactcaatggatcttcctttcttaaggacaaaaagctccctgaatcaaaaaccatatcgaccaaagaggacactggttctggtctgagcaacgagcagtcgaagaaagacaagatccgcacagctctgaaaatactcgagagcgtagtccctggtgcaaaaggaaacgaagcgctcttacttctggacgaagcaattgattacctaaagttgctgaaacgagacttaatctccacagaggttaagaaccaaagctccaccactcacaagtcaccaatcttgttgcttaaagagacaacatggggaacaagaaatctgcagacagataaggcgtgaaagattctgacgagttaaaacgtgtgaagtgggtttttgggtacgtatccttgcaccagcttt

SEQ ID NO: 435 - protein, 348 aa, Arabidopsis thaliana
MPLDKRQRDLPLGLSPQACFKDIVGRSVLPRIPLPELGKLYAAKLQARCLQPPPFQSLLCSHDKESYGKRFSRSDMRSWCAAATTTTTPLGALESSQKRLLIFDQSGDQTRLLQCPFPLRFPSHAAAEPVKLSELQGIEKAFKEDGEEFHKSDGTESEMHEDTEEINALLYSDDDYDDDCESDDEVMSTGHSPYPNEGVCNKRELEEIDGPCKRQKLLDKVNNISDLSSLVGTESSTQLNGSSFLKDKKLPESKTISTKEDTGSGLSNEQSKKDKIRTALKILESVVPGAKGNEALLLLDEAIDYLKLLKRDLISTEVKNQSSTTHKSPILLLKETTWGTRNLQTDKA

SEQ ID NO: 436 - DNA, 1357 bp, Arabidopsis thaliana
gtgatttctctctgccatttccttcgatttgatttctgggttctcttcttctcgtctctcttctgcatgtttcgccactctaccttagaaaaaaggttactttcgcctccgatttaggctcgatttgatgaattcgtcgtcgtgtggctatttatcaaattgagcattagggtttctgatttgtgggttcagaattgtttttatctatctgtcttgttgttttttgtccgctacaaaagcctatggattctcagaggggtattgttgaacaagctaaatctcagtccttgaataggcaaagctctctttacagcttaacacttgatgaggttcaaaatcacttggggagttctggtaaagctctgggaagcatgaaccttgatgagcttttgaagagtgtctgttctgttgaagctaatcagccatcgtctatggctgtcaatggtggagcagctgctcaggagggtctttctcgccaggggagtttgactttgcctcgggatctcagcaaaaagactgttgatgaggtttggaaagacattcagcagaataagaatggaggtagtgctcatgagaggagggataagcagcctacacttggggaaatgacgcttgaagacctgttgttgaaagcaggagtggtcactgagactatccctggttcgaaccatgatggtcctgttggtggtggtagtgctggttcaggtgctggtttagggcaaaacattactcaagttggcccatggattcaatatcatcagctcccatcaatgccacagcctcaagcatttatgccctatccggtttcagatatgcaagcaatggtgtctcagtcttctttgatgggtggtttgtcagatacacaaactcctggaaggaagagggtagcttcaggagaagttgtagagaagactgtagagaggaggcagaagagaatgataaagaacagagagtctgctgctcgttcccgagctaggaaacaggcttacactcatgagctagagatcaaagtttcacggttagaagaagaaaacgaaagactcaggaagcaaaaggaggtggaaaaatcctcccaagtgtaccaccgcctgatcccaagcggcagctccgacggacaagctcggctcctttctgatctctaaactctttttgtctttttctttttttctcttctgtgtcggttcacttataaaaaagagaggaaaacagctttgtttctttgtacattccgtagactttcttgacttggagcaattctgttaactttaaaatattctcgagttattgtagtagcagactagcagcagtaatggttttcatgagtccgattgaaattcagagattgaacaggaaaaaa

SEQ ID NO: 437 - protein, 299 aa, Arabidopsis thaliana
MDSQRGIVEQAKSQSLNRQSSLYSLTLDEVQNHLGSSGKALGSMNLDELLKSVCSVEANQPSSMAVNGGAAAQEGLSRQGSLTLPRDLSKKTVDEVWKDIQQNKNGGSAHERRDKQPTLGEMTLEDLLLKAGVVTETIPGSNHDGPVGGGSAGSGAGLGQNITQVGPWIQYHQLPSMPQPQAFMPYPVSDMQAMVSQSSLMGGLSDTQTPGRKRVASGEVVEKTVERRQKRMIKNRESAARSRARKQAYTHELEIKVSRLEEENERLRKQKEVEKSSQVYHRLIPSGSSDGQARLLSDL

SEQ ID NO: 438 - DNA, 1604 bp, Arabidopsis thaliana
tttgggcgggtctttctttccctaaatctttcttttattttgctgtttaaaaaaaaaatccaaccataagacaaaacaacgaacgaggaagagagagagagaaggatatatctctaatcacgatgcaggagataataccggattttcttgaagagtgtgaatttgtcgacacttcactagccggagatgatctatttgccatcttagagagtcttgaaggtgccggagagatatctccgacagctgcatctacacctaaagatggaaccacaagttccaaggagttagttaaggatcaagattatgaaaactcatctcctaagaggaaaaagcaaagactagaaaccaggaaagaagaggacgaagaagaagaagacggagacggagaagcagaagaagataataagcaagatgggcaacaaaagatgtctcatgtaaccgtggaacgtaaccggagaaagcaaatgaacgagcacttaaccgttttgcgttctcttatgccttgtttctacgtcaaacggggggaccaagcatcgatcataggaggagttgtggagtacataagcgagttacaacaagttctccaatctttggaagccaagaaacaacgtaaaacctacgccgaagtcctaagcccgagagttgtcccgagccctcgtccttcaccgcctgttctaagcccaagaaaaccgcctcttagcccgcgcatcaaccaccaccagattcaccaccacctacttctccctcccataagtcctcgaacacctcagccaacaagcccataccgggccattccaccgcaactaccactcatcccacagcctccgcttcgctcttacagctcattggccagttgcagcagcttaggagatccacctccatactctcctgcttcatcttcttcatctccttcagttagtagtaaccatgagagtagtgtgatcaatgagcttgttgctaactcaaaatcggctttggctgatgtggaagtgaagttttcaggagctaacgtgctgctcaaaacggtgtcgcataagatcccgggacaagttatgaagataattgctgctcttgaagatttggctcttgagattcttcaggttaatattaacaccgtcgacgaaaccatgcttaattctttcaccatcaagattggaattgagtgccaactaagtgcagaagaactggctcaacaaattcagcaaacattctgctagtaaagaaggatttaatatagcttcgtataaaccttaacgagagagcagtacgtactcactttctctccttagtatccctttaattatcttttcagttttctgcaaagatatggagtttaaaaaaataaaattgttatctaaagttttaatcaaatattgattaattataactaatataggtataagtgagttttaaagattatcagcttcataacagccatcgtcatgtttactttcttttaaattttagaatttagacgtactcctaccatgtaattttatttctgtcattacatcaagcattgtagctgtaattgcatatgaatgaacaatagtgtatgagtgatctcatgaataatattcttcttgcaacacaaaaaaaaaaaa

SEQ ID NO: 439 - protein, 364 aa, Arabidopsis thaliana
MQEIIPDFLEECEFVDTSLAGDDLFAILESLEGAGEISPTAASTPKDGTTSSKELVKDQDYENSSPKRKKQRLETRKEEDEEEEDGDGEAEEDNKQDGQQKMSHVTVERNRRKQMNEHLTVLRSLMPCFYVKRGDQASIIGGVVEYISELQQVLQSLEAKKQRKTYAEVLSPRVVPSPRPSPPVLSPRKPPLSPRINHHQIHHHLLLPPISPRTPQPTSPYRAIPPQLPLIPQPPLRSYSSLASCSSLGDPPPYSPASSSSSPSVSSNHESSVINELVANSKSALADVEVKFSGANVLLKTVSHKIPGQVMKIIAALEDLALEILQVNINTVDETMLNSFTIKIGIECQLSAEELAQQIQQTFC

SEQ ID NO: 440 - DNA, 1118 bp, Arabidopsis thaliana
caaacccaaattctctcagcgccggtcaaatacttgtctctctctctctctctctttcactcttgtcttgtctccttcgaagctgtttgttctgtaagaaagatggaagcaggtggcgcgtacaatccacgcactgttgaagaggtgtttagggattttaagggtcgtagagctggcatgattaaggctttaaccactgatgttcaggagtttttccgactttgtgatcccgaaaaggagaacctttgcctttacggacatccaaatgagcactgggaagtgaatttgccagctgaagaggttcctcctgagctcccagagcctgtcttgggtatcaattttgccagagacgggatggcggaaaaggattggttgtcccttgttgctgtccacagtgatgcttggcttcttgctgttgctttcttttttggagccaggtttggatttgacaaagctgataggaagaggcttttcaatatggtgaatgacctcccaacaatctttgaggttgtagctggcactgctaagaaacaaggaaaagataagtcctctgtttccaacaacagcagcaacagatccaaatcaagctccaagcgaggatctgaatcccgtgccaagttctcaaagccggagcccaaagatgatgaggaggaggaagaggaaggtgtggaagaggaggatgaggatgagcaaggtgaaacacagtgtggagcatgtggtgagagctatgcagctgatgagttctggatttgctgtgacctctgtgagatgtggtttcatggaaagtgtgttaagataacaccagcaagagctgagcacatcaagcaatacaagtgcccttcttgcagcaacaaaagggctcgttcctaaatttgttgaccgctcgcttctgtgtatctacctttgcatatgatgatgaacagcttaactgtttggtttagatcagatttgtcatatggatttggtaatttaggaagacattttagttttttcattgttacattttggcgattgaagggataactctttgtttaggggtaatgatcttttgctctgttttatgtttgtttattaacattcttcaaactcaatcaaaagtattttggttagtcttaaaa

SEQ ID NO: 441 - protein, 255 aa, Arabidopsis thaliana
MEAGGAYNPRTVEEVFRDFKGRRAGMIKALTTDVQEFFRLCDPEKENLCLYGHPNEHWEVNLPAEEVPPELPEPVLGINFARDGMAEKDWLSLVAVHSDAWLLAVAFFFGARFGFDKADRKRLFNMVNDLPTIFEVVAGTAKKQGKDKSSVSNNSSNRSKSSSKRGSESRAKFSKPEPKDDEEEEEEGVEEEDEDEQGETQCGACGESYAADEFWICCDLCEMWFHGKCVKITPARAEHIKQYKCPSCSNKRARS

SEQ ID NO: 442 - DNA, 1284 bp, Arabidopsis thaliana
atggggaaagttcgtcaagattcaggatcagacgatgacaattcaataaagaaatcttttactaaaggtccttggacacaagcagaagacaatcttttgatagcttacgttgataaacatggtgatggaaactggaacgctgttcaaaacaactcgggcctttctcgttgtggtaaaagttgtcgccttcgttgggtaaatcatctgagaccagatttgaaaaaaggcgcttttacagagaaagaagagaaacgtgtcatcgaacttcatgctttgttagggaacaaatgggcacgaatggctgaagaactaccgggacgaacagataatgagatcaagaacttctggaatacaagacttaagagactgcaacgacttggtttacctgtttaccccgatgaagttcgagagcatgcgatgaatgcagcgacacattccggtctaaacactgattcattggatggtcatcatagtcaagaatatatggaggcagatactgttgagattcctgaagtggatttcgagcatttaccactcaatcgatcttcttcatactaccagtcaatgcttcgacatgttcctcccactaacgtctttgtgagacaaaaaccgtgtttctttcagccgcctaatgtgtataacttgataccaccatctccttacatgtctaccggaaaacgtcctagagaaccagaaaccgcgtttccttgcccgggtggatataccatgaacgagcaaagccctcggctctggaactatccttttgttgagaacgtttcagaacagttaccggatagtcatttgcttggtaatgctgcttattcttctcctcctggacctcttgttcacggggttgagaatttcgagttcccttcattccaatatcatgaagagcctggcggttggggagcagatcaacctaacccaatgccggaacatgagtcagataacactttggttcaatctcctctgacagctcaaacaccatcagattgtccatcatcatcactctatgatggactgttggaatcagttgtctatggatcatcaggggagaaaccggcaaccgataccgattcagaatcttcactgtttcagtcatttacaccagccaatgaaaacataaccggtaaaacttgttttcttactctttatgcattacatgcacttcattgtttgtgtaatcaattcaagaagtctcctcttctccatctgcatgacaaacttaattggtgtaacaaatttaggttcaactccttcaaatcagggacacacatcctttga

SEQ ID NO: 443 - protein, 427 aa, Arabidopsis thaliana
MGKVRQDSGSDDDNSIKKSFTKGPWTQAEDNLLIAYVDKHGDGNWNAVQNNSGLSRCGKSCRLRWVNHLRPDLKKGAFTEKEEKRVIELHALLGNKWARMAEELPGRTDNEIKNFWNTRLKRLQRLGLPVYPDEVREHAMNAATHSGLNTDSLDGHHSQEYMEADTVEIPEVDFEHLPLNRSSSYYQSMLRHVPPTNVFVRQKPCFFQPPNVYNLIPPSPYMSTGKRPREPETAFPCPGGYTMNEQSPRLWNYPFVENVSEQLPDSHLLGNAAYSSPPGPLVHGVENFEFPSFQYHEEPGGWGADQPNPMPEHESDNTLVQSPLTAQTPSDCPSSSLYDGLLESVVYGSSGEKPATDTDSESSLFQSFTPANENITGKTCFLTLYALHALHCLCNQFKKSPLLHLHDKLNWCNKFRFNSFKSGTHIL

SEQ ID NO: 444 - DNA, 1500 bp, Arabidopsis thaliana
atgtcttcatcgtacaacacaattgctttgtcctccactccgaccttcctcctctcaagtgccgctgccggacccggaccaaacaactttaaccgtcaagaggctgcgatgaccatggttcaacaacaacccacttcctccgttgctccaccacccaagaagcgaaggaaccaacccggaaacccaagcaagttcctatgtgaagtgtgcaacaaagggttccagagggaacagaatctgcagctccacaggaggggacacaaccttccatggaagctgaaacaaaagtccaacaaagaggtgaggaggaaggtgtacctttgtccggagccctcgtgcgtccaccatgaccccgcacgtgctctcggagacctcaccggaatcaagaagcattactatcggaagcacggtgagaaaaagtggaagtgcgataagtgctctaagcgttacgctgttcaatctgattggaaagctcactctaagacctgtggtaccaaagagtatcgatgtgactgtggtaccatcttctctagtgaaagagagaaagacagtgaaggagaaaggggaaaaattaaagatgccaaatttggtcacattggttggtttcattgtttaatcgatgaacatggtggtcagcgtgatatagtaggagtagttgatgaacactttacatttctagggagagacagttacatcacccacagggcattctgtgatgcactcatacaggagtcagcaagaaaccccaccgtgagcttcacggcaatggcagctggtggtggtggtggcgccagacatggcttttacggcggagcttcttccgctctctctcacaaccatttcggtaacaatccaaattccggtttcacccctctagctgctgcaggctacaatctgaaccgttcatcttccgacaagttcgaagacttcgttcctcaggccaccaaccctaatcccggtccgaccaacttcctcatgcaatgctctccgaaccaaggactgttagcccagaacaatcagagtctcatgaaccatcatggtctgatcagcctcggtgataacaacaacaacaaccacaactttttcaacctcgcatactttcaagacaccaagaattctgatcagacaggtgttccttctctgttcaccaatggtgctgataacaacggcccatctgctttgcttagagggctaacttcttcatcttcgtcaagtgtggtcgttaatgactttggagattgtgatcatggaaaccttcaaggactcatgaactctctagctgcgacaacagatcaacaaggccggtcccctagccttttcgaccttcatttcgcaaacaatcttagcatgggtggctcggataggttgactttggactttcttggtgttaatggaggaattgtgagcaccgtcaatggccgtggtggtcgtagtggtggacctcctctggatgctgagatgaagttttcacacccaaatcatccatatggcaaagcttga

SEQ ID NO: 445 - protein, 499 aa, Arabidopsis thaliana
MSSSYNTIALSSTPTFLLSSAAAGPGPNNFNRQEAAMTMVQQQPTSSVAPPPKKRRNQPGNPSKFLCEVCNKGFQREQNLQLHRRGHNLPWKLKQKSNKEVRRKVYLCPEPSCVHHDPARALGDLTGIKKHYYRKHGEKKWKCDKCSKRYAVQSDWKAHSKTCGTKEYRCDCGTIFSSEREKDSEGERGKIKDAKFGHIGWFHCLIDEHGGQRDIVGVVDEHFTFLGRDSYITHRAFCDALIQESARNPTVSFTAMAAGGGGGARHGFYGGASSALSHNHFGNNPNSGFTPLAAAGYNLNRSSSDKFEDFVPQATNPNPGPTNFLMQCSPNQGLLAQNNQSLMNHHGLISLGDNNNNNHNFFNLAYFQDTKNSDQTGVPSLFTNGADNNGPSALLRGLTSSSSSSVVVNDFGDCDHGNLQGLMNSLAATTDQQGRSPSLFDLHFANNLSMGGSDRLTLDFLGVNGGIVSTVNGRGGRSGGPPLDAEMKFSHPNHPYGKA

SEQ ID NO: 446 - DNA, 1140 bp, Arabidopsis thaliana
gctcatatccatcattctctctgatctcaagaaataatctcaaatctcttacactcatagtcttcaagcaacttctcagattcagctcttatggatcatttgttacaacaccaggatgtttttgggaattataacaaagcaagagaagcaatgggactatcatattcatcaaacccaacaccgttagataacgaccagaagaaaccttctcctgcaacggctgtgacaaggccacagcctccggagctagctctcaggtgtccacgttgcgactcaacaaacacaaagttttgttactacaacaactacagtctcactcagcctcgctacttctgcaaatcatgccggagatattggactaaaggtggaactctaaggaacatccccgtgggtggaggctgccggaaaaacaaacgatccacatcttcggctgcaagaagcctcagaaccactccagaaccggcgtcccacgacgggaaagtcttctcggcggcaggttttaatgggtatagtaacaatgaacatattgatctgagcttagcctttgccttgctgaacaaacaacatccggggagttcttcacagctagggtttcattcagaactcggtagctctcatcagtctgacatggaaggtatgtttgggacaagccaacaaaaagagaacgctacttatgcgtttggtaacgggagcagcggtttgggtgatccaagcagagtcttatggggatttccatggcagatgaatggagagagctttggaatgatgaacataggaggaggtggtggtcatgtagatcagattgattcagggagagagatgtggaccaatatgaactacattaattctggtgctttaatgtagttcaaaattaaaaccccaatattatttgggttttgatttagggtttgaatttcatgttttttaatgggagtagaaaagggtggtagctattttatgaaatggttaaggaagtatagatatattagggcttcttcaaagagtttcaaacttgcaaaatggggttggggtagttcttgttttcgatttctgatctaaattgttgagtttctttatttgtatgttcactatgtttaaatgaaacatttcctttgttgttctaaaaaaaaaaaaaaaaaa

SEQ ID NO: 447 - protein, 257 aa, Arabidopsis thaliana
MDHLLQHQDVFGNYNKAREAMGLSYSSNPTPLDNDQKKPSPATAVTRPQPPELALRCPRCDSTNTKFCYYNNYSLTQPRYFCKSCRRYWTKGGTLRNIPVGGGCRKNKRSTSSAARSLRTTPEPASHDGKVFSAAGFNGYSNNEHIDLSLAFALLNKQHPGSSSQLGFHSELGSSHQSDMEGMFGTSQQKENATYAFGNGSSGLGDPSRVLWGFPWQMNGESFGMMNIGGGGGHVDQIDSGREMWTNMNYINSGALM

SEQ ID NO: 448 - DNA, 963 bp, Arabidopsis thaliana
atggttttctcatccgtctcaagctttttagatccaccaattaattggccacagtctgcgaatccaaataaccatcctcatcatcatcagctacaagaaaatggaagtttagttagtggccaccaccaagtactctctcaccacttcccacaaaaccctaaccctaaccaccaccatgttgagacagcagccgccaccaccgttgatccgagcagtctcaatggccaggcggctgagagagcgaggctagctaagaactctcagccgccagagggagccctaaagtgtcctcgatgtgactcagccaataccaagttctgttacttcaacaactacaacctcacgcagccacgccacttctgcaaagcttgccgtcgctactggacacgtggcggtgccttgaggaacgtacctgtcggtggtggctgccggaggaataagaagggtaaatccggaaattcaaagtcttcctcttcctctcagaacaagcagtcaacgtctatggtcaacgctacaagccctactaatactagtaatgtccagctccaaacaaatagccaattcccatttttgcccactctacaaaacctcactcaacttggtggtattggtttaaacttagccgccattaatggaaataatggtggaaatggtccggtcatgggtaacaacaacgagaataacctaatgacttctcttggatcatccagccactttgctttgttcgatcgaaccatgggattatataatttccctaacgaggtaaatatgggattatcttctattggtgctactagggtttctcaaactgctcaggtgaaaatggaggacaaccatttgggtaatataagccgcccggtttcggggttgacatctccagggaatcaatccaatcaatattggaccggtcaaggtctccccggttcttcatctaacgatcatcatcaccagcatcttatgtga

SEQ ID NO: 449 - protein, 320 aa, Arabidopsis thaliana
MVFSSVSSFLDPPINWPQSANPNNHPHHHQLQENGSLVSGHHQVLSHHFPQNPNPNHHHVETAAATTVDPSSLNGQAAERARLAKNSQPPEGALKCPRCDSANTKFCYFNNYNLTQPRHFCKACRRYWTRGGALRNVPVGGGCRRNKKGKSGNSKSSSSSQNKQSTSMVNATSPTNTSNVQLQTNSQFPFLPTLQNLTQLGGIGLNLAAINGNNGGNGPVMGNNNENNLMTSLGSSSHFALFDRTMGLYNFPNEVNMGLSSIGATRVSQTAQVKMEDNHLGNISRPVSGLTSPGNQSNQYWTGQGLPGSSSNDHHHQHLM

SEQ ID NO: 450 - DNA, 859 bp, Arabidopsis thaliana
caatccactaacgatccctaaccgaaaacagagtagtcaagaaacagagtattttttctacatggatccatttttaattcagtccccattctccggcttctcaccggaatattctatcggatcttctccagattctttctcatcctcttcttctaacaattactctcttcccttcaacgagaacgactcagaggaaatgtttctctacggtctaatcgagcagtccacgcaacaaacctatattgactcggatagtcaagaccttccgatcaaatccgtaagctcaagaaagtcagagaagtcttacagaggcgtaagacgacggccatgggggaaattcgcggcggagataagagattcgactagaaacggtattagggtttggctcgggacgttcgaaagcgcggaagaggcggctttagcctacgatcaagctgctttctcgatgagagggtcctcggcgattctcaatttttcggcggagagagttcaagagtcgctttcggagattaaatatacctacgaggatggttgttctccggttgtggcgttgaagaggaaacactcgatgagacggagaatgaccaataagaagacgaaagatagtgactttgatcaccgctccgtgaagttagataatgtagttgtctttgaggatttgggagaacagtaccttgaggagcttttggggtcttctgaaaatagtgggacttggtgaaagattaggatttgtattagggaccttaagtttgaagtggttgattaattttaaccctaatatgttttttgtttgcttaaatatttgattctattgagaaacatcgaaaacagtttgtatgtacttttgtgatacttggcg

SEQ ID NO: 451 - protein, 218 aa, Arabidopsis thaliana
MDPFLIQSPFSGFSPEYSIGSSPDSFSSSSSNNYSLPFNENDSEEMFLYGLIEQSTQQTYIDSDSQDLPIKSVSSRKSEKSYRGVRRRPWGKFAAEIRDSTRNGIRVWLGTFESAEEAALAYDQAAFSMRGSSAILNFSAERVQESLSEIKYTYEDGCSPVVALKRKHSMRRRMTNKKTKDSDFDHRSVKLDNVVVFEDLGEQYLEELLGSSENSGTW

SEQ ID NO: 452 - DNA, 748 bp, Arabidopsis thaliana
ccaagaaaagggaagatcacgcattcttataggcgtaattcgtaaatagtggtgagtatgaatgatgcagacacaaacttggggagtagtttcagcgatgatactcactctgtgttcgagtttccggagctagacttgtcagatgaatggatggatgatgatcttgtgtctgcggtttccgggatgaatcagtcttatggttatcagactagtgatgttgctggtgctttattctcaggttcttctagctgtttcagtcatcctgaatctccaagtaccaaaacttatgttgctgctacagccactgcttctgccgacaaccaaaacaagaaagaaaagaaaaaaattaaagggagagttgcgttcaagacacggtccgaggtggaagtgcttgacgacgggttcaagtggagaaagtatgggaagaagatggtgaagaacagcccacatccaagaaactactacaaatgttcagttgatggctgtcccgtgaagaaaagggttgaacgagacagagatgatccgagctttgtgataacaacttacgagggttcccacaatcactcaagcatgaactaagactcgaactaaggctcaaggcgaccatgctatattcagcacatcttattttctatggttacgaacgatacttaaaactgcttctagttctttatatccattgtaaactggttgcaggttcacaaattttgagaggtttatgacattctaaatctgtagtacttatata

SEQ ID NO: 453 - protein, 173 aa, Arabidopsis thaliana
MNDADTNLGSSFSDDTHSVFEFPELDLSDEWMDDDLVSAVSGMNQSYGYQTSDVAGALFSGSSSCFSHPESPSTKTYVAATATASADNQNKKEKKKIKGRVAFKTRSEVEVLDDGFKWRKYGKKMVKNSPHPRNYYKCSVDGCPVKKRVERDRDDPSFVITTYEGSHNHSSMN

SEQ ID NO: 454 - DNA, 911 bp, Arabidopsis thaliana
attctaaagtcctcctctcggaaagtaagagactcaacttccgagccgccatggacgccggagtagcagtaaaagctgacgtggcagtcaaaatgaagagagaaagaccattcaaagggatcagaatgagaaaatgggggaaatgggttgcggagattcgagaacccaacaagcgttcaagactttggctcggctcttactctactcccgaagcggcggcgcgtgcatacgacacggctgtcttttacctcagaggaccaactgctacgctcaacttcccggagcttctgccgtgtacctccgccgaggatatgtcagcggcaacgatcaggaaaaaggcgacggaggtgggagctcaagtagatgcgataggggcgacggtggtgcagaacaacaaacgccgccgcgtttttagtcaaaagcgtgactttggcggcgggttattagagcttgttgacttgaacaagttacctgacccggaaaatctcgatgatgatttggtgggaaaatagactgaaaaataataataaaatatcttacaatggtggctgtagctatcgtacgcggaatgcttgggcttgtgttatatgactacgtggttacggaaagattcctctgtttcgtcattgtattaaaatttaatcccacaagtcaaacatactgtacattattcttaatttagtattttcttattaatatctatcatttgtttggtgaacaccagaatattagactattaatgtaacgagtttttaatatttcgatcataataacaccaagctagttaaaggttaatatcttgttacgaagtcttgagtaagttcaattgtcatatatatgtaacggaagaggttcgttcgggtcccaagtgaagtggatcaaaggtgacttcacataaaaaataaaaaaaa

SEQ ID NO: 455 - protein, 153 aa, Arabidopsis thaliana
MDAGVAVKADVAVKMKRERPFKGIRMRKWGKWVAEIREPNKRSRLWLGSYSTPEAAARAYDTAVFYLRGPTATLNFPELLPCTSAEDMSAATIRKKATEVGAQVDAIGATVVQNNKRRRVFSQKRDFGGGLLELVDLNKLPDPENLDDDLVGK

SEQ ID NO: 456 - DNA, 1000 bp, Arabidopsis thaliana
gtcttcttcaattattctattccctctgagagattctctctgcgtttcttagatcgagcgagcgaagcgagagatcatggaaggtggagctgctctctacaatcctcgaactgtcgaagaagttttcaaggatttcaaaggtcgtcgtactgccattgtcaaagctctcaccaccgatgttcaagagttttaccaacaatgtgaccctgagaaggagaatctttgcttgtatgggttaccgaatgaagaatgggaagtgaatttaccagctgaagaagtgcctcctgagttaccagagccagctcttggtattaactttgctagggatgggctctctgaaaaggaatggctttcgcttgttgctattcacagtgacgcttggttactgtctgtctcgttttactttggctcaaggttttctttccacaaggaagagaggaagcgtttgttcaacatgatcaatgatgttcctactatatttgaagtagtgactggaatggctaaagcaaaggacaagtcatctgctgcaaatcaaaacggaaacaaatccaagtctaactctaaagttagaacttcagagggaaaaagctcaaagaccaagcagccaaaagaggaggacgaagaaatagatgaagatgatgaggatgaccacggggaaaccctttgtggagcctgtggagacagtgatggtgctgatgaattctggatctgctgtgacctttgtgagaagtggttccatggcaagtgtgtgaagatcactccagctagagctgagcatatcaaacaatacaagtgcccttcatgcagcaacaaaagagctcgagcttaaaaatgttgtattgtagagaatagcctgtagtgacaactctcactaccctcgatctgtctttatttggctagtcttttagctcgttattggccataacagcttgggcctatttctctgtataattggtttgattttgcaactgagaaaaaaaaggaaactctttaactgaaa

SEQ ID NO: 457 - protein, 250 aa, Arabidopsis thaliana
MEGGAALYNPRTVEEVFKDFKGRRTAIVKALTTDVQEFYQQCDPEKENLCLYGLPNEEWEVNLPAEEVPPELPEPALGINFARDGLSEKEWLSLVAIHSDAWLLSVSFYFGSRFSFHKEERKRLFNMINDVPTIFEVVTGMAKAKDKSSAANQNGNKSKSNSKVRTSEGKSSKTKQPKEEDEEIDEDDEDDHGETLCGACGDSDGADEFWICCDLCEKWFHGKCVKITPARAEHIKQYKCPSCSNKRARA

SEQ ID NO: 458 - DNA, 978 bp, Arabidopsis thaliana
atggggcgatcaccatgttgcgatgagaatggtctaaagaaagggccatggacacaagaggaggatgataaactgatagatcacattcaaaaacatggccatggcagctggagagctcttccaaagcaagccggtttaaaccgatgcggaaagagttgtagattaagatggaccaactacttgagacctgacatcaagagaggaaatttcactgaagaggaagaacaaactattatcaacctccattcccttcttggaaacaagtggtcgtcgatagccggtaatcttcctggaagaacggacaatgaaataaaaaactattggaacacacatttgagaaagaaacttctccaaatggggattgatccggtgacccataggccaagaaccgaccatctaaacgttttagcagctctcccgcagcttatagccgccgcaaatttcaacagcctcttgaatctcaaccaaaatgtgcaactggatgcaacaactcttgctaaagctcaactgctacacactatgattcaagtccttagcaccaataacaacaccaccaatccttctttttcttcatcaactatgcaaaacagtaacaccaatctctttggccaagcttcttacttagagaaccaaaatctttttggtcagtctcaaaacttctctcacattcttgaggatgagaatttgatggtcaaaacccaaattattgataaccctttggactctttttcttcccccatacaacccggttttcaagatgatcataattcactccctctattggttccggcgtctcctgaagaatctaaagaaactcaaaggatgatcaagaacaaagacatcgtcgattaccatcatcatgatgcttcaaacccttcatcatcaaactcaacgtttacacaagatcatcatcacccatggtgtgacactattgatgatggagcaagtgattctttttggaaagagataatagagtaa

SEQ ID NO: 459 - protein, 325 aa, Arabidopsis thaliana
MGRSPCCDENGLKKGPWTQEEDDKLIDHIQKHGHGSWRALPKQAGLNRCGKSCRLRWTNYLRPDIKRGNFTEEEEQTIINLHSLLGNKWSSIAGNLPGRTDNEIKNYWNTHLRKKLLQMGIDPVTHRPRTDHLNVLAALPQLIAAANFNSLLNLNQNVQLDATTLAKAQLLHTMIQVLSTNNNTTNPSFSSSTMQNSNTNLFGQASYLENQNLFGQSQNFSHILEDENLMVKTQIIDNPLDSFSSPIQPGFQDDHNSLPLLVPASPEESKETQRMIKNKDIVDYHHHDASNPSSSNSTFTQDHHHPWCDTIDDGASDSFWKEIIE

SEQ ID NO: 460 - DNA, 800 bp, Arabidopsis thaliana
aagtataataacacaaagaaacagagtaaaagaaagaaaaatggattttaagaaggaagaaacacttcgtagagggccatggctcgaagaagaagacgaacggctagtgaaggtcattagtcttttgggagaacgtcgttgggattctttagcaatagtttccggtttgaagaggagtggtaagagttgcaggctaaggtggatgaactatctgaatccgactctgaagcgtggaccgatgagtcaagaagaagagagaatcatctttcagctccatgctctatggggtaacaagtggtcgaagattgcgagaagattacccggtaggactgataacgagataaagaactattggagaactcattatagaaagaaacaggaagctcaaaactatggaaagctctttgagtggagaggaaatacaggagaagaattgttgcacaagtataaggaaacagagatcactaggacaaagacgacgtctcaagaacatggttttgttgaagttgtgagcatggaaagtggtaaagaagccaacggtggtgttggtggaagagaaagcttcggtgttatgaaatcaccgtatgaaaatcggatttcggattggatatcagagatttctactgaccagagtgaagcaaatctttcagaagatcacagcagcaatagctgcagtgagaacaatattaacattggtacttggtggtttcaagagactagggactttgaggagttttcatgttctctatggtcataattctaaagttggtttatttactttttaaaaaaaaaaaaaaaaa

SEQ ID NO: 461 - protein, 238 aa, Arabidopsis thaliana
MDFKKEETLRRGPWLEEEDERLVKVISLLGERRWDSLAIVSGLKRSGKSCRLRWMNYLNPTLKRGPMSQEEERIIFQLHALWGNKWSKIARRLPGRTDNEIKNYWRTHYRKKQEAQNYGKLFEWRGNTGEELLHKYKETEITRTKTTSQEHGFVEVVSMESGKEANGGVGGRESFGVMKSPYENRISDWISEISTDQSEANLSEDHSSNSCSENNINIGTWWFQETRDFEEFSCSLWS

SEQ ID NO: 462 - DNA, 1081 bp, Arabidopsis thaliana
aaaaatatgaggaagccagaggtagccattgcagctagtactcaccaagtaaagaagatgaagaagggactttggtctcctgaggaagactcaaagctgatgcaatacatgttaagcaatggacaaggatgttggagtgatgttgcgaaaaacgcaggacttcaaagatgtggcaaaagctgccgtcttcgttggatcaactatcttcgtcctgacctcaagcgtggcgctttctctcctcaagaagaggatctcatcattcgctttcattccatcctcggcaacaggtggtctcagattgcagcacgattgcctggtcggaccgataacgagatcaagaatttctggaactcaacaataaagaaaaggctaaagaagatgtccgatacctccaacttaatcaacaactcatcctcatcacccaacacagcaagcgattcctcttctaattccgcatcttctttggatattaaagacattataggaagcttcatgtccttacaagaacaaggcttcgtcaacccttccttgacccacatacaaaccaacaatccatttccaacgggaaacatgatcagccacccgtgcaatgacgattttaccccttatgtagatggtatctatggagtaaacgcaggggtacaaggggaactctacttcccacctttggaatgtgaagaaggtgattggtacaatgcaaatataaacaaccacttagacgagttgaacactaatggatccggaaacgcacctgagggtatgagaccagtggaagaattttgggaccttgaccagttgatgaacactgaggttccttcgttttacttcaacttcaaacaaagcatatgaatatttttacgtcatcttattcttttttctattgcggtttatactcaagattcttagccacacacacataaatgcaaatatatatacattgttagagagtattttgtatttcgtataatcttttcgtactagggcttgagccttgaggtcccatgtaacgattagtcaatgtaaaacatatatcctataataaataaataaaagaaataataagcacataaaaaaaaaaaaa

SEQ ID NO: 463 - protein, 280 aa, Arabidopsis thaliana
MRKPEVAIAASTHQVKKMKKGLWSPEEDSKLMQYMLSNGQGCWSDVAKNAGLQRCGKSCRLRWINYLRPDLKRGAFSPQEEDLIIRFHSILGNRWSQIAARLPGRTDNEIKNFWNSTIKKRLKKMSDTSNLINNSSSSPNTASDSSSNSASSLDIKDIIGSFMSLQEQGFVNPSLTHIQTNNPFPTGNMISHPCNDDFTPYVDGIYGVNAGVQGELYFPPLECEEGDWYNANINNHLDELNTNGSGNAPEGMRPVEEFWDLDQLMNTEVPSFYFNFKQSI

SEQ ID NO: 464 - DNA, 1020 bp, Arabidopsis thaliana
gaagatcataaagatcaaaaggagagaggtattaaaaaatgatgtgtagtcgaggccattggagacctgcagaagacgagaagctaagagaactcgtcgagcaatttggtcctcataattggaacgccatagctcagaagctctctggtcgatctggtaagagttgtagattgagatggtttaatcaattggatcctaggattaaccgaaaccctttcacggaggaagaagaagaaaggcttttagcgcctcatcggatccatgggaacagatggtctgtgatcgctagattttttcccggtcgaactgataacgctgttaaaaaccattggcacgtcatcatggctcgtcgtggccgagaacggtccaagctccgtccacgaggccttggccatgatggcacggtggctgcgactgggatgattggtaattataaagactgcgataaggagagaagattggcaaccacaaccgctatcaattttccttatcaattctctcatattaatcattttcaagtcctcaaagagtccttgaccggaaagatcgggttcagaaatagtactactccaatacaagaaggagcaatagaccaaactaaacgaccgatggagttctacaattttctccaagtaaacacggattcgaagatacacgaattgatagataattcaagaaaagacgaagaagaagatgtcgatcaaaacaaccgaattcgtaacgagaattgtgttccatttttcgactttttgtctgttggaaactctgcctctcagggtttatgttaatttgtccgtaccacatgtactataaggtggaccatatgttaactaaagataatgtagaaagtactaatcaattagagctcctgtttgagccaaatgtgaaaattagttaagacatcccaaacattttcttgtataacacatataaggttgtacttttatcaggtctaattttctatttttattttaaggatgtttaatcagacccataaccattcgataaaaaaaaaaaaaa

SEQ ID NO: 465 - protein, 249 aa, Arabidopsis thaliana
MMCSRGHWRPAEDEKLRELVEQFGPHNWNAIAQKLSGRSGKSCRLRWFNQLDPRINRNPFTEEEEERLLAPHRIHGNRWSVIARFFPGRTDNAVKNHWHVIMARRGRERSKLRPRGLGHDGTVAATGMIGNYKDCDKERRLATTTAINFPYQFSHINHFQVLKESLTGKIGFRNSTTPIQEGAIDQTKRPMEFYNFLQVNTDSKIHELIDNSRKDEEEDVDQNNRIRNENCVPFFDFLSVGNSASQGLC

SEQ ID NO: 466 - DNA, 1041 bp, Arabidopsis thaliana
gttcttgtattggtttggatcggtatacttagttgattacgtaattaaatagatcggcgtgaagaagaaaaatgatcatgtgcagccgaggccattggagaccagctgaagacgagaagctcaaggatcttgtcgaacaatacggtcctcacaattggaacgccattgctctcaagcttcctggtcgctctggtaagagttgtagattgagatggtttaatcaattggatccaaggatcaaccgaaaccctttcacggaagaagaagaagaaagacttttagcggctcatcggatccatgggaacagatggtccatcatcgcaaggcttttccctggaagaactgataacgccgtcaagaaccattggcacgtcatcatggctcgtcgcacacgccaaacctctaagcctcgtcttcttccctcgacgacttcgtcttcttctttaatggcgagtgaacaaatcatgatgagttctggtggttataatcataattatagttccgatgatcggaagaaaatatttccagcagactttataaatttcccttacaaattctctcatatcaatcatcttcacttcctaaaggagtttttccccggaaagatcgctttaagtcacaaagcaaatcagagtaagaagcctatggagttctacaattttctacaagtaaacacagattcaaacaagagcgagattatagatcaagattcaggtcaaagcaaacgcagtgactcggacaccaaacatgaaagtcatgttccattcttcgactttttatccgttggaaactctgcctcctaggattagtttttttgcagtaactcctaaatttctagattaactatttagtccgtatacgtacgagattatctaggtcgttagcatgtatgcttgatgtgtataatcactaactagtgagctattacctgcgaaaattgtaagaaaaatacataatgttgatgtatcacacattctcaatgtctgtaaaatttccatcgagttgttaactatcaaagttatccgtttgaaaaaaaaaaaa

SEQ ID NO: 467 - protein, 243 aa, Arabidopsis thaliana
MIMCSRGHWRPAEDEKLKDLVEQYGPHNWNAIALKLPGRSGKSCRLRWFNQLDPRINRNPFTEEEEERLLAAHRIHGNRWSIIARLFPGRTDNAVKNHWHVIMARRTRQTSKPRLLPSTTSSSSLMASEQIMMSSGGYNHNYSSDDRKKIFPADFINFPYKFSHINHLHFLKEFFPGKIALSHKANQSKKPMEFYNFLQVNTDSNKSEIIDQDSGQSKRSDSDTKHESHVPFFDFLSVGNSAS

SEQ ID NO: 468 - DNA, 1088 bp, Arabidopsis thaliana
aagagggaatctcaaaagtgtgtgtctgtgagagaggagagagagaatatgggcaaaggaagagcaccatgttgtgacaaaaccaaagtgaagagaggaccatggagccatgatgaagacttgaaactcatctctttcattcacaagaatggtcatgagaattggagatctctcccaaagcaagctggattgttgaggtgtggcaagagttgtcgtctgcgatggattaattacctcagacctgatgtgaaacgtggcaatttcagtgcagaggaagaagacaccatcatcaaacttcaccagagctttggtaacaagtggtcgaagattgcttctaagctgcctggaagaacagacaatgagatcaagaatgtgtggcatacacatctcaagaaaagattgagctcggaaactaaccttaatgccgatgaagcgggttcaaaaggttctttgaatgaagaagagaactctcaagagtcatctccaaatgcttcaatgtcttttgctggttccaacatttcaagcaaagacgatgatgcacagataagtcaaatgtttgagcacattctaacttatagcgagtttacggggatgttacaagaggtagacaaaccagagctgctggagatgccttttgatttagatcctgacatttggagtttcatagatggttcagactcattccaacaaccagagaacagagctcttcaagagtctgaagaagatgaagttgataaatggtttaagcacctggaaagcgaactcgggttagaagaaaacgataaccaacaacaacaacagcataaacagggaacagaagatgaacattcatcatcactcttggagagttacgagctcctcatacattaatgaagccataaagcaagtcattttcaccttgaaaatggaattattagctaacttattggcattattagtatataagcaagatcagataggcgcatgtagtagcaacaacgaagaaacgtcgaattgtagacaaaatgtagatattacagagttgaaagattgtattttgcaaatgattgctttgtagtgaaatcaagttatcacaaaaaaaaaaaaaa

SEQ ID NO: 469 - protein, 273 aa, Arabidopsis thaliana
MGKGRAPCCDKTKVKRGPWSHDEDLKLISFIHKNGHENWRSLPKQAGLLRCGKSCRLRWINYLRPDVKRGNFSAEEEDTIIKLHQSFGNKWSKIASKLPGRTDNEIKNVWHTHLKKRLSSETNLNADEAGSKGSLNEEENSQESSPNASMSFAGSNISSKDDDAQISQMFEHILTYSEFTGMLQEVDKPELLEMPFDLDPDIWSFIDGSDSFQQPENRALQESEEDEVDKWFKHLESELGLEENDNQQQQQHKQGTEDEHSSSLLESYELLIH

SEQ ID NO: 470 - DNA, 880 bp, Arabidopsis thaliana
cgacggtacggtggagatagagatagcatccatggagatgtctagaggaagcaacagttttgacaataagaagcctagttgccaaagaggtcactggagacctgttgaagatgacaatctccggcaactcgttgaacaatacggtcccaagaactggaattttattgctcaacatctctatggaagatcagggaaaagctgtagattaagatggtacaaccaacttgatccaaacatcaccaagaaacccttcaccgaggaggaagaagagagactgcttaaagctcatcggatccaagggaatcgttgggcctccatagcccgactgttccccgggaggaccgacaacgctgtcaaaaaccattttcatgtcatcatggctagacgcaaacgggaaaacttctcttccacagctacttctacgttcaaccaaacttggcatactgttttgagccctagttctagtcttacaaggctaaatagatcccatttcgggctatggaggtatcgaaaggataagagttgcggtctctggccttactcttttgtttcaccacctacgaatggtcaatttggatcttcatctgtctctaacgtacaccacgaaatttatcttgagaggagaaagtcgaaagagttggtggatcctcagaattacacatttcatgcagccacaccagatcataagatgacttcaaatgaagatggaccatccatgggagatgatggtgagaagaacgatgttactttcattgattttcttggtgttggattagcttcttaggttataacatcacaagtcaaagcttttaagggtttctatcattagggttaggcatcattttcagccttttgcttccttaaactctcatatggatct

SEQ ID NO: 471 - protein, 250 aa, Arabidopsis thaliana
MEMSRGSNSFDNKKPSCQRGHWRPVEDDNLRQLVEQYGPKNWNFIAQHLYGRSGKSCRLRWYNQLDPNITKKPFTEEEEERLLKAHRIQGNRWASIARLFPGRTDNAVKNHFHVIMARRKRENFSSTATSTFNQTWHTVLSPSSSLTRLNRSHFGLWRYRKDKSCGLWPYSFVSPPTNGQFGSSSVSNVHHEIYLERRKSKELVDPQNYTFHAATPDHKMTSNEDGPSMGDDGEKNDVTFIDFLGVGLAS

SEQ ID NO: 472 - DNA, 891 bp, Arabidopsis thaliana
atggggaaaggaagagcaccatgctgcgacaagaacaaagtgaagagagggccatggagccctcaagaagatctcactctcatcacttttattcaaaaacatggccatcaaaactggagatctcttcccaagcttgctggattgttgagatgtgggaaaagttgccgactaagatggataaactatctgagaccggacgtgaagcgaggcaactttagcaaaaaggaggaagatgctatcattcactaccatcaaacccttggaaacaagtggtcaaagatcgcgtccttcttgccgggaagaactgacaacgagatcaaaaacgtgtggaacacgcatctcaagaaacgactcactccatcttcttcttcttcatccctctctagcactcatgaccaaagcacaaaagcagatcatgacaagaactgtgacggggctcaagaagaaatacattcagggttaaatgagagccaaaactcagctacttcgtcacatcaccaaggcgagtgtatgcacacaaaaccagagcttcatgaggttaatggactcaacgagatccagttcctgctcgaccatgatgactttgatgatataacctctgagtttcttcaggataacgatatcttatttccgctagactctcttcttcataaccaccaaactcacatttcaacccaagaaatgactcgagaggtaaccaaatcgcaatcatttgatcatcctcaaccggatatcccatgcggatttgaagacacaaacgaagaatccgacttgaggagacagctggttgaatcaaccacacctaacaatgagtacgacgagtggttcaacttcattgacaaccaaacttactttgatgattttaatttcgtcggagaagtatgtctatga

SEQ ID NO: 473 - protein, 296 aa, Arabidopsis thaliana
MGKGRAPCCDKNKVKRGPWSPQEDLTLITFIQKHGHQNWRSLPKLAGLLRCGKSCRLRWINYLRPDVKRGNFSKKEEDAIIHYHQTLGNKWSKIASFLPGRTDNEIKNVWNTHLKKRLTPSSSSSSLSSTHDQSTKADHDKNCDGAQEEIHSGLNESQNSATSSHHQGECMHTKPELHEVNGLNEIQFLLDHDDFDDITSEFLQDNDILFPLDSLLHNHQTHISTQEMTREVTKSQSFDHPQPDIPCGFEDTNEESDLRRQLVESTTPNNEYDEWFNFIDNQTYFDDFNFVGEVCL

SEQ ID NO: 474 - DNA, 981 bp, Arabidopsis thaliana
gtaccggcgacctctttgtgggtcactcttcatcaatgggtgacaaaggaaggagcttaaagatcaacaagaacatggaggaattcacgaaagtggaagaagaaatggacgtaaggagaggtccatggacagttgaggaagatttagagctcatcaattacattgctagtcatggtgaaggtcgatggaactctctcgctcgttgcgccgaactcaaaaggaccggaaaaagctgcagacttcggtggctgaactatctccgaccagatgtgcgccgtggaaacataaccctcgaagaacaactcttgattcttgaacttcacacacgttggggcaatagatggtctaagattgcacaatatttaccaggaagaacggataacgagatcaaaaactattggagaacacgtgttcaaaagcatgcaaaacagcttaaatgcgacgtgaacagtcaacaatttaaagacaccatgaagtatctttggatgcctcggctcgtagaaaggatccaagccgcgtccatcgggtctgtttccatgtcatcttgcgtcaccacctcctcagatcagttcgtgatcaacaacaacaacaccaacaacgtggataatttggctttaatgagtaaccctaatggttacatcacgccggataattccagcgtggcagtatctcctgtatcagatttgacggagtgtcaagtgagtagtgaagtgtggaagattggtcaggatgagaatttggtggatccaaaaatgacatcgccgaattatatggataatagcagtggactattaaacggagattttacgaagatgcaagatcaaagtgaccttaattggtttgaaaatattaatgggatggtaccaaattattcggacagtttttggaacattggaaatgatgaagacttctggctcttacaacaacatcaacaagtccacgacaatggaagcttctgaatagacaagaagctatgcggcc

SEQ ID NO: 475 - protein, 307 aa, Arabidopsis thaliana
MGDKGRSLKINKNMEEFTKVEEEMDVRRGPWTVEEDLELINYIASHGEGRWNSLARCAELKRTGKSCRLRWLNYLRPDVRRGNITLEEQLLILELHTRWGNRWSKIAQYLPGRTDNEIKNYWRTRVQKHAKQLKCDVNSQQFKDTMKYLWMPRLVERIQAASIGSVSMSSCVTTSSDQFVINNNNTNNVDNLALMSNPNGYITPDNSSVAVSPVSDLTECQVSSEVWKIGQDENLVDPKMTSPNYMDNSSGLLNGDFTKMQDQSDLNWFENINGMVPNYSDSFWNIGNDEDFWLLQQHQQVHDNGSF

SEQ ID NO: 476 - DNA, 786 bp, Arabidopsis thaliana
atggtggaagaagtttggagaaagggtccatggaccgccgaagaagaccgtcttttgatcgaatacgtccgtgttcacggtgaaggtcgttggaactctgtctctaaactcgcaggattgaaaaggaatggcaaaagctgcagactaagatgggtgaattaccttagaccagacctcaagagaggacagatcactccacatgaagaaagtataatacttgagctacacgctaagtggggaaataggtggtcaacaattgcacgtagtttaccaggaagaacagacaatgagatcaagaactattggagaacccatttcaagaaaaaggcaaagcctacgactaacaatgcggagaagataaagagtcgtctcctaaaaaggcaacacttcaaggaacagagagaaatagagttgcaacaagaacagcagttgtttcagttcgaccaactcggtatgaaaaagatcatctctttactcgaagaaaacaatagcagtagcagtagcgatggcggtggtgatgtgttctattatcctgatcaaataacacattcatcaaaaccctttggctataactctaattcattagaggagcagttacaaggtagattttctcctgtaaacatacctgatgctaatactatgaacgaagacaatgccatatgggacgggttttggaacatggatgttgtaaatggacatggtgggaacttgggtgttgtggctgctactgctgcttgtggcccaaggaagccctatttccataacttggtgattccattttgttaa

SEQ ID NO: 477 - protein, 261 aa, Arabidopsis thaliana
MVEEVWRKGPWTAEEDRLLIEYVRVHGEGRWNSVSKLAGLKRNGKSCRLRWVNYLRPDLKRGQITPHEESIILELHAKWGNRWSTIARSLPGRTDNEIKNYWRTHFKKKAKPTTNNAEKIKSRLLKRQHFKEQREIELQQEQQLFQFDQLGMKKIISLLEENNSSSSSDGGGDVFYYPDQITHSSKPFGYNSNSLEEQLQGRFSPVNIPDANTMNEDNAIWDGFWNMDVVNGHGGNLGVVAATAACGPRKPYFHNLVIPFC

SEQ ID NO: 478 - DNA, 1274 bp, Arabidopsis thaliana
atagctcccaactaataggaatctcaagcttctcactctctcttgtttttccattggacttttggaacataagctatgcaaactgaggagcttttgtcgccaccacagactccttggtggaatgcttttggatctcagccgttgactacagagagcctttccggcgaagcttctgattcattcaccggagttaaggcagttactacggaggcagaacaaggtgtggtggataaacaaacttctacaactctcttcactttctcacctggtggtgaaaagagttcaagagatgtgccaaagcctcatgttgctttcgcgatgcaatcagcttgcttcgagtttggatttgctcagccaatgatgtacacaaagcatcctcatgttgaacaatactatggagttgtttcagcatacggatctcagaggtcttcgggccgagtaatgattccactgaagatggagacagaagaagatggtaccatctatgtgaactcaaagcagtaccatggaattatcaggcgacgccagtcccgagcaaaggctgaaaaactgagtagatgccgtaagccatatatgcatcactcacgccatctccatgctatgcgccgtcctagaggatctggcgggcgtttcttgaacaccaagacagctgatgcggctaagcagtctaagccgagtaattctcagagttctgaagtctttcatccggaaaatgagaccataaactcatcgagggaagcaaatgagtcaaatctctcggattctgcagttacaagtatggattactttctaagttcgtcggcttattctcctggtggcatggtcatgcctatcaagtggaatgcagcagcaatggatattggctgctgcaaacttaatatatgatcagcagataggggacaagacatgattggtcaccagtccttttgtcttgtcccttatctttcagccaaacggaaagagaacttgtgtcttggaaaaaagacattgagtttccttggtttataagattggtccttttaccatccgtttggctgtaaacaggcaaatcatctttggctcatgcttcatcaagttcttatcttcgtctgttttcttctacgcatcttcataagatctctgaactagtgaataacatttcctagcatcatgtttcaactagtgtgtgttgtaagaaactctgccttatttccagatgatgtattgtgtgtaacgtgtttatgaaacaaacgtaagactttcaagttaaaaaaaaaaaaaaaaaaaaaaaaaaa

SEQ ID NO: 479 - protein, 269 aa, Arabidopsis thaliana
MQTEELLSPPQTPWWNAFGSQPLTTESLSGEASDSFTGVKAVTTEAEQGVVDKQTSTTLFTFSPGGEKSSRDVPKPHVAFAMQSACFEFGFAQPMMYTKHPHVEQYYGVVSAYGSQRSSGRVMIPLKMETEEDGTIYVNSKQYHGIIRRRQSRAKAEKLSRCRKPYMHHSRHLHAMRRPRGSGGRFLNTKTADAAKQSKPSNSQSSEVFHPENETINSSREANESNLSDSAVTSMDYFLSSSAYSPGGMVMPIKWNAAAMDIGCCKLNI

SEQ ID NO: 480 - DNA, 1047 bp, Arabidopsis thaliana
atggaaagtctcgcacacattcctcccggttatcgattccatccgaccgatgaagaactcgttgactattatctcaagaacaaagttgcattcccgggaatgcaagttgatgttatcaaagatgttgatctctacaaaatcgagccatgggacatccaagagttatgtggaagagggacaggagaagagagggaatggtatttctttagccacaaggacaagaaatatccaactgggacacgaaccaatagagcaacgggctccggattttggaaagcaacgggtcgagacaaggccatttactcaaagcaagagcttgttgggatgaggaagactcttgtcttttacaaaggtagggccccaaatggtcagaaatctgattggataatgcacgaataccgtcttgagaccgatgaaaatggaccgcctcatgaggaaggatgggtggtttgtcgcgctttcaagaagaagctaaccacgatgaactacaacaatccaagaacaatgatgggatcatcatcaggccaagaatctaactggttcacgcagcaaatggatgtggggaatggtaattactatcatcttcctgatctagagagtccgagaatgtttcaaggctcatcatcatcatcactatcatcattacatcagaatgatcaagacccttatggtgtcgtactcagcactattaacgcaaccccaactacaataatgcaacgagatgatggtcatgtgattaccaatgatgatgatcatatgatcatgatgaacacaagtactggtgatcatcatcaatcaggattactagtcaatgatgatcataatgatcaagtaatggattggcaaacgcttgacaagtttgttgcttctcagctaatcatgagccaagaagaggaagaagttaacaaagatccatcagataattcttcgaatgaaacatttcatcatctctctgaagagcaagctgcaacaatggtttcgatgaatgcttcttcctcttcttctccatgttccttctactcttgggctcaaaatacacacacgtaa

SEQ ID NO: 481 - protein, 348 aa, Arabidopsis thaliana
MESLAHIPPGYRFHPTDEELVDYYLKNKVAFPGMQVDVIKDVDLYKIEPWDIQELCGRGTGEEREWYFFSHKDKKYPTGTRTNRATGSGFWKATGRDKAIYSKQELVGMRKTLVFYKGRAPNGQKSDWIMHEYRLETDENGPPHEEGWVVCRAFKKKLTTMNYNNPRTMMGSSSGQESNWFTQQMDVGNGNYYHLPDLESPRMFQGSSSSSLSSLHQNDQDPYGVVLSTINATPTTIMQRDDGHVITNDDDHMIMMNTSTGDHHQSGLLVNDDHNDQVMDWQTLDKFVASQLIMSQEEEEVNKDPSDNSSNETFHHLSEEQAATMVSMNASSSSSPCSFYSWAQNTHT

SEQ ID NO: 482 - DNA, 1008 bp, Arabidopsis thaliana
atggcagctgcaccaccgatcgagccggcggtgacgacgacgttccctggcttcaaattctccccgaccgacatcgaacttatatcttattacttgaagaggaagatggatggtttggagagatctgttgagattatacctgaggttgagatttacaacttcgagccttgggatttacctgataagtctatcgttaaatcggatagcgaatggttcttcttctgtgctcgcggtaagaagtatccccacggttcacagaacagaagagcaaccaagataggatattggaaagccacaggaaaagagcgtaatgtgaagtcaggttctgaggtcattggaacaaagagaacgcttgtattccacattggccgcgcgccaaaaggaggaagaacggaatggcttatgcatgagtactgcatgattggagtatcactggatgctctggttatttgccgacttaggaggaatactgaatttcaagggagtacaattcaaaagccaccacaaccaagtttaccactggataagcacgtaaacttgcggaatgaagctatttcagaaagtatttatggttgggaaactatggttgatttctacttatcaagtgagtcagggcaagaactacttagtgaaatagcagaatcttcacaatcttcacaaaatccacaggttcctagtgaagaagatttctatgccgatatactgagggatgaaatagtaaagctagatgatccggcggtatccggtaatacactgatcaatgtaccaaggcttcaaacagagtccaataccacaagagtactacctttacctgacatggtagacaaacaaatgcaatcgttgctacagaaactaccattacaaaatgacactggagaagagaacaacatatccatgtcaaattgctttatcggtatctactcgattaagtctataaaccgagcgcgatgggacgttgttgtttggttactcgttatgatagccgtgttggtgttttatttagtgtga

SEQ ID NO: 483 - protein, 335 aa, Arabidopsis thaliana
MAAAPPIEPAVTTTFPGFKFSPTDIELISYYLKRKMDGLERSVEIIPEVEIYNFEPWDLPDKSIVKSDSEWFFFCARGKKYPHGSQNRRATKIGYWKATGKERNVKSGSEVIGTKRTLVFHIGRAPKGGRTEWLMHEYCMIGVSLDALVICRLRRNTEFQGSTIQKPPQPSLPLDKHVNLRNEAISESIYGWETMVDFYLSSESGQELLSEIAESSQSSQNPQVPSEEDFYADILRDEIVKLDDPAVSGNTLINVPRLQTESNTTRVLPLPDMVDKQMQSLLQKLPLQNDTGEENNISMSNCFIGIYSIKSINRARWDVVVWLLVMIAVLVFYLV

SEQ ID NO: 484 - DNA, 1257 bp, Arabidopsis thaliana
atgggagatagaaacaacgacggtgatcagaaaatggaggatgtattgttgcccggatttaggtttcatccaaccgacgaagagctcgtaagcttctacctgaagcggaaggttcaacacaaccctctctccattgagctcataagacaactcgatatctacaaatatgacccctgggatcttccaaagtttgcgatgacgggtgaaaaagaatggtacttttattgtccaagggacaggaagtataggaacagctcgaggccaaaccgagtgaccggagctggtttttggaaagccacgggaacggaccggccgatatactcgtcagaaggaaacaaatgcataggtttaaagaagtccttagtgttctacaaaggaagagcagcgaaaggagttaagactgattggatgatgcatgagtttcgtttgccttctctctccgaaccatctcctccttctaagagattcttcgactctcctgtctctcccaacgattcatgggctatatgcagaatcttcaaaaagaccaacacaacgaccctaagagctctctctcactcttttgtttcctcgttaccaccagaaacaagcaccgacacaatgtctaaccaaaagcaatcaaacacataccatttttcttcagacaagatcctcaaacctagctctcacttccagtttcaccatgagaatatgaacactcccaaaactagtaatagtacaactccatccgttcccactataagtcccttctcttacttggatttcacttcatacgacaaacccaccaacgttttcaatccggtttcatgtttagaccaacaatacctcacaaatctctttcttgccacacaagaaacacaacctcagtttcccaggctcccctcgtcaaatgaaatcccatcgtttctgctaaacacgtcttcagattcgaccttcttgggagaattcacgagccatatcgacctcagcgcagtgttggcccaagagcaatgtcccccgcttgtaagcctaccacaggagtatcaagagacgggattcgaaggaaatggtataatgaagaacatgcgtggttccaatgaagatcatcttggtgatcattgcgacacacttcggtttgatgatttcacttcaacaattaatgagaaccatcgtcatcatcaagacctgaaacagaacatgacattgctggagagttattattcttctttatcgtccatcaatagcgatttgccagcttgtttctccagtacaacctga

SEQ ID NO: 485 - protein, 418 aa, Arabidopsis thaliana
MGDRNNDGDQKMEDVLLPGFRFHPTDEELVSFYLKRKVQHNPLSIELIRQLDIYKYDPWDLPKFAMTGEKEWYFYCPRDRKYRNSSRPNRVTGAGFWKATGTDRPIYSSEGNKCIGLKKSLVFYKGRAAKGVKTDWMMHEFRLPSLSEPSPPSKRFFDSPVSPNDSWAICRIFKKTNTTTLRALSHSFVSSLPPETSTDTMSNQKQSNTYHFSSDKILKPSSHFQFHHENMNTPKTSNSTTPSVPTISPFSYLDFTSYDKPTNVFNPVSCLDQQYLTNLFLATQETQPQFPRLPSSNEIPSFLLNTSSDSTFLGEFTSHIDLSAVLAQEQCPPLVSLPQEYQETGFEGNGIMKNMRGSNEDHLGDHCDTLRFDDFTSTINENHRHHQDLKQNMTLLESYYSSLSSINSDLPACFSSTT

SEQ ID NO: 486 - DNA, 823 bp, Arabidopsis thaliana
ctcttctctcgatctctctccctctctgcctcctctcttcctccaatcaacaaacacctctctgtttcactcccgccctttttcgaattcttctgatggcggagtcgcaggccaagagtcccggaggctgtggaagccatgagagtggtggagatcaaagtcccaggtcgttacatgttcgtgagcaagataggtttcttccgattgctaacataagccgtatcatgaaaagaggtcttcctgctaatgggaaaatcgctaaagatgctaaggagattgtgcaggaatgtgtctctgaattcatcagtttcgtcaccagcgaagcgagtgataaatgtcaaagagagaaaaggaagactattaatggagatgatttgctttgggcaatggctactttaggatttgaagactacatggaacctctcaaggtttacctgatgagatatagagagatggagggtgacacaaagggatcagcaaaaggtggggatccaaatgcaaagaaagatgggcaatcaagccaaaatggccagttctcgcagcttgctcaccaaggtccttatgggaactctcaagctcagcagcatatgatggttccaatgccgggaacagactagtatgagaggagtattcaactttggttatgttccaccaaaagaggttatcttatctgtatattatttgtgttgtaagagttttgctatgcagaacttgtgactataatcatctcattgttttgttttgtttttgtttccttggatttgttctgaatatgtcatcaagtcagtcagtctatttatatatttggtttgttgattatttc

SEQ ID NO: 487 - protein, 173 aa, Arabidopsis thaliana
MAESQAKSPGGCGSHESGGDQSPRSLHVREQDRFLPIANISRIMKRGLPANGKIAKDAKEIVQECVSEFISFVTSEASDKCQREKRKTINGDDLLWAMATLGFEDYMEPLKVYLMRYREMEGDTKGSAKGGDPNAKKDGQSSQNGQFSQLAHQGPYGNSQAQQHMMVPMPGTD

SEQ ID NO: 488 - DNA, 1964 bp, Arabidopsis thaliana
tccttccacaaaacttttttaattttatctgaaaaattaaaacaaccgaaacaaaaaaaaaaaactaaaaatcaaaaatctcatcaccttccttgctctgtattttttctctctcactaaatcctccatggatccttctctctctgcaaccaatgatcctcatcatcctcctcctcctcagttcacatctttccctcctttcaccaacaccaaccccttcgcctctccaaaccaccccttcttcaccggacccaccgccgtcgcgccgccaaacaacatccatctctatcaagcagctcctccgcagcagccacaaacatctccagttcctcctcatccatctatttcccaccctccttactctgacatgatttgcacggcgattgcagcgttaaacgaaccagatgggtcaagcaagcaagctatttcgaggtacatagagagaatttacactgggattcctactgctcatggagctttgttgacacaccatctcaagactttgaagaccagtgggattcttgtcatggttaagaaatcttacaagcttgcttctactcctcctcctcctcctcctactagtgtagctcctagtcttgaacctcccagatctgatttcatagtcaacgagaaccaacctttacctgatccggttttggcttcttctactcctcagactattaaacgtggtcgtggtcgacctccaaaagctaaaccagatgttgttcaacctcaacctctgactaatggaaaactcacctgggaacagagtgaattacctgtctctcgaccagaggagatacagatacagccgccacagttaccgttacagccacagcagccggttaagagaccgccgggtcgtcctagaaaagatggaacttcgccgacggtgaagccagctgcttctgtttccggtggtgtggagactgtgaaacgaagaggtagacctccgagtggaagagctgctgggagggagagaaagcctatagtagtctcagctccagcttcagtgttcccgtatgttgctaatggtggtgttagacgccgagggagaccaaagagagttgacgctggtggtgcttcctctgttgctccaccaccaccaccaccaactaacgtagagagtggaggagaggaggttgcagtcaagaaacgaggaagaggacggcctcctaagattggaggtgttatcaggaagcctatgaagccgatgagaagctttgctcgtactggaaaacccgtaggaagacccagaaagaatgcggtgtcagtgggagcttctggacgacaagatggtgactatggagaactgaagaagaagtttgagttgtttcaagcgagagctaaggatattgtaattgtgttgaaatccgagataggaggaagtggaaatcaagcagtggttcaagccatacaggacctggaagggatagcagagacaacaaacgagccaaagcacatggaagaagtgcagctgccagacgaggaacaccttgaaaccgaaccagaagcagagggtcaaggacagacagaagcagaggcaatgcaagaagctctgttctaaagataaagccttgacataaaaagctagcaagtggtgggtttacttgttgtgtgttacatgaaatttttaatcttataagggtgtttgcaggagaaaaacaaaaagaacaatgtgatgaactgatgatgatgattgtgtctctaaccaaacaacaaggagaggtagggtaatgtctgtaaagtgaattaggatgttaccattgttcatgcttcccatctctctccatcgtccatatctgtgtaggcagctttgttctttgttccctcgtgttttttttagactgttgtgtctcttattctattttgtctccttaggctttttaggagttgttgttgatgtttatcaaaaacgcttatgtaatttttatgaccacttctactttttatgatggtttctt

SEQ ID NO: 489 - protein, 479 aa, Arabidopsis thaliana
MDPSLSATNDPHHPPPPQFTSFPPFTNTNPFASPNHPFFTGPTAVAPPNNIHLYQAAPPQQPQTSPVPPHPSISHPPYSDMICTAIAALNEPDGSSKQAISRYIERIYTGIPTAHGALLTHHLKTLKTSGILVMVKKSYKLASTPPPPPPTSVAPSLEPPRSDFIVNENQPLPDPVLASSTPQTIKRGRGRPPKAKPDVVQPQPLTNGKLTWEQSELPVSRPEEIQIQPPQLPLQPQQPVKRPPGRPRKDGTSPTVKPAASVSGGVETVKRRGRPPSGRAAGRERKPIVVSAPASVFPYVANGGVRRRGRPKRVDAGGASSVAPPPPPPTNVESGGEEVAVKKRGRGRPPKIGGVIRKPMKPMRSFARTGKPVGRPRKNAVSVGASGRQDGDYGELKKKFELFQARAKDIVIVLKSEIGGSGNQAVVQAIQDLEGIAETTNEPKHMEEVQLPDEEHLETEPEAEGQGQTEAEAMQEALF

SEQ ID NO: 490 - DNA, 839 bp, Arabidopsis thaliana
ctctgcctctctctctctctcaaaacccatctcgaaagtctttctctttcgagggtttagatcctccatggaaggcggcggagttgctgacgtggctgtccccggtacgaggaagagagacagaccttacaaaggaattaggatgaggaagtggggaaagtgggtggcggagattcgtgagcctaacaagcgctctaggttatggcttggctcttactctactcccgaggcggcggcgcgagcttacgacacggcggttttctatcttagaggacctacggcgaggcttaacttccctgagcttcttcctggggagaaattctccgacgaggatatgtcggctgcgaccatcaggaagaaagccacggaggtcggtgctcaggttgatgctttgggcacggcggtgcaaaataaccgccaccgtgtttttggtcagaatcgagatagtgatgtggataataagaattttcatcggaattatcaaaacggtgaacgagaagaagaagaagaagatgaggatgacaagagattgaggagtggcggccggttattggatcgggttgacttgaataaattacccgacccggaaagctccgatgaagaatgggaaagcaaacattaaaaatatatagtttggagcggtggctgttgctaacgtacgccaacggcttgcttctacgaatcattagcgccgtttatgatttttttttttttttttttcattatctgaaaatttagggctttttagttattaatttttgttttgtttttttcctttcttgcgagttttgcggtttatggaattttaggctattgcttaacgaaaaaaaaaaaaaaaa

SEQ ID NO: 491 - protein, 184 aa, Arabidopsis thaliana
MEGGGVADVAVPGTRKRDRPYKGIRMRKWGKWVAEIREPNKRSRLWLGSYSTPEAAARAYDTAVFYLRGPTARLNFPELLPGEKFSDEDMSAATIRKKATEVGAQVDALGTAVQNNRHRVFGQNRDSDVDNKNFHRNYQNGEREEEEEDEDDKRLRSGGRLLDRVDLNKLPDPESSDEEWESKH

SEQ ID NO: 492 - DNA, 1177 bp, Arabidopsis thaliana
tttcttctcttcttcacacaaacacacacagatctcttcttcatcacattacttctggctttacatcttttttcttctccatgaggaaagggagaggctcttccgtcgttggacccgcccttccagtaaccgccggtggatctgtgaaggagccgaggtatagaggcgttaggaagagaccttggggtcgattcgcagctgagatccgtgatccattaaaaaaatctcgtgtctggctcggtactttcgattccgccgtagatgctgcacgcgcttacgataccgccgcacgtaacctccgtggtccaaaggccaagaccaatttcccgatcgattgttctccttcttctcctctccaacctctcacctacctccacaatcaaaacctctgttctcctccggtgattcagaaccagatcgatccgtttatggaccatcggttatacggcggaggtaatttccaggagcagcagcagcagcagattattagtcggccggcgagtagcagcatgagcagcaccgttaaatcttgtagcggaccgagaccgatggaagccgcggcggcgtcttcgtcggtggcgaaaccgttacatgcgattaagagatatccgagaactccaccggtagctccggaggattgtcatagcgactgcgattcttcgtcgtctgttattgacgacggagatgatatcgcatcttcgtcttcccgccggaaaacgccgtttcagtttgatcttaatttcccgccgttggatggcgttgacttattcgctggcgggatagatgatctccactgtaccgatctacgtctctgatttgctgctttacaaaaaaaatccgttgattacacacaaaaaaaattctcaaattttacaaaatgataactttatgctcttttgtttttccattttcctttgatatcatattgaaagagaaaaaaaggaagaacaaaaaaaaaagattgagcgtgatgattttatcatcaacgaagatgatgacgattaaaaagagagagagattgtgttaagatctgttactgtaagaaccagatctgggtttcatttttatctgtttcttcttataaaagatccaacaaccctttgttacatatatataacattctgaagctggtgatgatttctgaatgattcaaatccattatcttaaaaaaaaaaaa

SEQ ID NO: 493 - protein, 244 aa, Arabidopsis thaliana
MRKGRGSSVVGPALPVTAGGSVKEPRYRGVRKRPWGRFAAEIRDPLKKSRVWLGTFDSAVDAARAYDTAARNLRGPKAKTNFPIDCSPSSPLQPLTYLHNQNLCSPPVIQNQIDPFMDHRLYGGGNFQEQQQQQIISRPASSSMSSTVKSCSGPRPMEAAAASSSVAKPLHAIKRYPRTPPVAPEDCHSDCDSSSSVIDDGDDIASSSSRRKTPFQFDLNFPPLDGVDLFAGGIDDLHCTDLRL

SEQ ID NO: 494 - DNA, 1017 bp, Arabidopsis thaliana
cagctttaacactactctctctctctctcaaatgggaaaacaaatcaacatagagagtagtgctactcatcatcaagacaatattgtttccgttataacagccacgatatcctcctcctccgtcgtaacgtcttcgtcagactcttggtctacctccaaaagatcgttagtgcaagacaatgactccggagggaaacggcggaagagcaacgttagtgatgataacaagaatccgacgtcgtatagaggagtgaggatgaggagttggggaaaatgggtgtcggagattagagagccgaggaagaaatcaagaatatggcttggcacttatccaacggcagagatggcagctcgtgctcatgatgtggcggctttagctattaaaggcaactccggttttcttaatttccctgaattatccggtttgcttcctcgtccggttagctgctctcctaaggatatacaagctgcagctaccaaagccgccgaagcaaccacgtggcacaaaccggttatcgataagaaattagctgatgagctaagccactctgagttgttgtctaccgctcagtcttcgacttctagtagtttcgtgttttcttcggacacgtcggagacttctagtacggacaaggaaagcaacgaagagacggtgtttgatttgccggaccttttcacggacgggcttatgaacccaaacgatgcgttttgtttatgcaacggcacctttacgtggcagctttacggagaggaggatgtagggttcaggtttgaagagccgtttaattggcaaaatgactaaaccgccctccacttgcttactgtaattactaacatataattttcttgataaagaacatatatttccattacggtattaactaatcttttctatccttttctcttttcttgtttctacatctgagtatattgtcactatgtgaaaaaattgatctcgttttgaatatttacttttcaaaattgaagtaacgcaagtgattgataaaaaaaaaaaaa

SEQ ID NO: 495 - protein, 256 aa, Arabidopsis thaliana
MGKQINIESSATHHQDNIVSVITATISSSSVVTSSSDSWSTSKRSLVQDNDSGGKRRKSNVSDDNKNPTSYRGVRMRSWGKWVSEIREPRKKSRIWLGTYPTAEMAARAHDVAALAIKGNSGFLNFPELSGLLPRPVSCSPKDIQAAATKAAEATTWHKPVIDKKLADELSHSELLSTAQSSTSSSFVFSSDTSETSSTDKESNEETVFDLPDLFTDGLMNPNDAFCLCNGTFTWQLYGEEDVGFRFEEPFNWQND

SEQ ID NO: 496 - DNA, 2008 bp, Arabidopsis thaliana
ctctcatttcgccatagctgagagcttcttctactttcccttagcttcttttttccttcatttttgttctacccttgcgaatctctgaaatgaaccctcaagctaatgaccggaaggagtttcagggagattgttcggcgacgggagatctcacggcaaagcacgattcagctggaggaaacggaggtggaggtgctaggtataagctgatgtcaccggccaagcttccgatctcgaggtcgactgatatcacgattcctcctgggttgagtccgacttcgtttttggaatctcctgttttcatctccaacatcaagccagaaccttcccctactactggttctttgttcaagcctcgaccagtgcacatttctgctagctcaagttcttatacaggcagggggttccatcagaacacctttactgagcagaagtccagtgaatttgagttcagacctcctgcatcaaatatggtatatgcagagcttggcaagattagaagtgagccaccagtacattttcaaggccagggccatggatcctcacactcaccttcttcgatcagtgatgctgcaggttcctcaagtgagctaagccggccaactcctccttgtcagatgacaccaacgagctcagatattccggctggatctgatcaagaggaatcaatccagacttcccaaaatgactccagaggaagcactccatccatcttggctgatgatggttataactggagaaaatatggtcaaaagcatgtcaaagggagtgaatttccccggagctattataaatgtacacatcctaattgtgaagtgaaaaagttatttgaaagatctcatgatgggcagatcaccgatattatatacaagggtacacatgaccatcctaaacctcaacctggtcgccgaaactctggtggtatggctgcacaagaagaaaggctagacaagtatccttcttcaactggccgagatgagaagggatctggcgtctacaacttgtctaaccccaatgaacaaactggtaaccctgaagtacctcctatctcagcatctgacgatggtggagaagcggcagcgtcaaataggaataaagatgagccggacgatgatgatccattctcaaaacggaggaggatggagggtgcgatggaaataactccactagtgaaacccatccgggagcctcgggttgttgttcaaactctgagtgaggttgacattctggatgatggttatagatggcgcaaatatgggcagaaagtcgtaagggggaacccaaatcccaggagctactacaaatgcacagctcatggatgcccagtgagaaaacacgtggagagagcatcacatgatccaaaagctgtaataacaacatacgaaggcaaacacgatcatgatgttcccacttcaaagtctagcagcaatcacgaaatccagcctcggttcagaccagatgaaacagacaccatcagcctcaatcttggtgttggaatctcatctgatggacctaaccacgcttccaacgaacatcagcaccagaatcaacaacttgtcaaccaaactcacccaaatggagtcaatttcaggtttgttcatgctagtcccatgtcatcctactatgctagcttaaatagcggtatgaatcagtacggccagagagaaacaaagaacgagactcaaaatggtgacatctcgtccttgaacaattcatcttacccatatccgcccaacatggggagagtacaatcgggtccgtaaaacaaaaagtaagcaacattatgtacgggatcttcttaggttaggaatgggacgaggccttgttctatataattcctatttcttcacagagagctgatcttgattcaaactatctccaccatatatatttgtttgtgtcacctgtattgagttccaaaaatgttatgtaaaaatacacaacaagatgttaatgcttttatttaaacaagaaacagcaatattactacaaaaaaaaaaaaaaaaaa

SEQ ID NO: 497 - protein, 557 aa, Arabidopsis thaliana
MNPQANDRKEFQGDCSATGDLTAKHDSAGGNGGGGARYKLMSPAKLPISRSTDITIPPGLSPTSFLESPVFISNIKPEPSPTTGSLFKPRPVHISASSSSYTGRGFHQNTFTEQKSSEFEFRPPASNMVYAELGKIRSEPPVHFQGQGHGSSHSPSSISDAAGSSSELSRPTPPCQMTPTSSDIPAGSDQEESIQTSQNDSRGSTPSILADDGYNWRKYGQKHVKGSEFPRSYYKCTHPNCEVKKLFERSHDGQITDIIYKGTHDHPKPQPGRRNSGGMAAQEERLDKYPSSTGRDEKGSGVYNLSNPNEQTGNPEVPPISASDDGGEAAASNRNKDEPDDDDPFSKRRRMEGAMEITPLVKPIREPRVVVQTLSEVDILDDGYRWRKYGQKVVRGNPNPRSYYKCTAHGCPVRKHVERASHDPKAVITTYEGKHDHDVPTSKSSSNHEIQPRFRPDETDTISLNLGVGISSDGPNHASNEHQHQNQQLVNQTHPNGVNFRFVHASPMSSYYASLNSGMNQYGQRETKNETQNGDISSLNNSSYPYPPNMGRVQSGP

SEQ ID NO: 498 - DNA, 979 bp, Arabidopsis thaliana
ggcggatctcttcggtggtggccacggcggcgagcttatggaagcacttcaacctttttacaaaagtgcttccacgtctgcttcaaatcctgcgtttgcgtcctcaaacgatgcgtttgcgtctgccccaaacgacctattttcttcttcttcttactataatcctcatgcatctttattcccttcacattccacaacctcttacccggatatttattctggatccatgacctatccatcttcattcgggtcggatcttcaacaacccgaaaactaccaatctcagttccattaccaaaacactatcacttacactcaccaagacaacaacacttgcatgcttaacttcattgagccgagccaaccgggttttatgacccaaccgggtccgagttcgggttcggtttcaaaaccggctaagctctatagaggagtgaggcaaagacattggggaaaatgggtcgcggagatccgtttacccaggaaccgaacccgactttggctcggaacattcgacacggctgaagaagccgcgttggcttatgatcgcgccgcgtttaagcttcgtggtgactcggctcggcttaacttcccagctctccgataccaaaccggctcgtctccgtctgataccggcgaatatggtcctattcaagctgccgtagacgctaaactagaagccatattagctgagccgaagaatcagccgggcaaaacggagaggacgtcgaggaaacgagctaaagccgcggcttcttcagctgagcagccgtcagcgccacaacaacattccgggtcgggtgaaagtgatgggtcgggttcaccgacttcggatgttatggtgcaggagatgtgccaagagccagagatgccatggaatgaaaatttcatgctcggcaagtgtccttcttatgagatagattgggcttcaattttatcgtgaaaaattaggattcaattcatttttattcattttaac

SEQ ID NO: 499 - protein, 301 aa, Arabidopsis thaliana
MEALQPFYKSASTSASNPAFASSNDAFASAPNDLFSSSSYYNPHASLFPSHSTTSYPDIYSGSMTYPSSFGSDLQQPENYQSQFHYQNTITYTHQDNNTCMLNFIEPSQPGFMTQPGPSSGSVSKPAKLYRGVRQRHWGKWVAEIRLPRNRTRLWLGTFDTAEEAALAYDRAAFKLRGDSARLNFPALRYQTGSSPSDTGEYGPIQAAVDAKLEAILAEPKNQPGKTERTSRKRAKAAASSAEQPSAPQQHSGSGESDGSGSPTSDVMVQEMCQEPEMPWNENFMLGKCPSYEIDWASILS

SEQ ID NO: 500 - DNA, 845 bp, Arabidopsis thaliana
aattttatttccttctctcaaatcttcccaccaaaaattaactctttcgttcacactaagtcccttttaaaagaaaatatcccaattaatggaacgtgacgactgccggagatttcaggactcgccggcgcagacgacggagagaagagtgaaatataaaccaaagaagaaaagagccaaagatgatgatgatgagaaagttgtttcgaagcatccaaattttcgaggtgtcagaatgagacaatggggaaaatgggtgtccgaaatcagagagccaaaaaagaaatcaagaatctggctcggtactttctccacggcggagatggcggcgcgtgctcacgacgtggcagctttagccatcaaaggcggttctgcacatctcaacttcccggagctcgcttatcacctccctagaccagctagtgccgaccctaaagacatccaagctgccgccgccgcagctgcagccgctgtggccattgacatggatgtagagacgtcttcgccgtcgccatctcccacagttacggaaacgtcatctccggctatgatagcactctccgacgacgcgttctccgatcttcctgatctcttgctcaacgtgaaccataacatcgatggcttctgggactcttttccctatgaagaacccttcctctctcaaagttactagaaactcaaaactatgtcgtttttgtatgtatttttgtcatgtgaccattttttgacgtcgaaaatcacccggataatccaaattgtatgatttattaatggttgatgattttctttgtgtggaacaatgtgtatgatacgtaatcaaaagttcaaaaaaaaaataaaaaaaa

SEQ ID NO: 501 - protein, 194 aa, Arabidopsis thaliana
MERDDCRRFQDSPAQTTERRVKYKPKKKRAKDDDDEKVVSKHPNFRGVRMRQWGKWVSEIREPKKKSRIWLGTFSTAEMAARAHDVAALAIKGGSAHLNFPELAYHLPRPASADPKDIQAAAAAAAAAVAIDMDVETSSPSPSPTVTETSSPAMIALSDDAFSDLPDLLLNVNHNIDGFWDSFPYEEPFLSQSY

SEQ ID NO: 502 - DNA, 1674 bp, Arabidopsis thaliana
aggtcgaattttctgaaattaagattcattcctccatggaagaagctctgtttttattctctttagcttagcttagcttctactgatctgtttttgctacaaaatcccatctttttctttaaaactctttatctctgaatcttgagtttcttgtagaagaagaagcaattttgaatctttcgtaatcataaagattcgtggaggatctctactgatttgtcggaatctctcactacagaatcacttgatcttatgtccggatggaggagagagaaggaaccaacatcaacaacaacatcactagcagtttcggcttgaagcagcaacatgaagctgctgcttctgatggtggttactcaatggacccaccaccaagacccgaaaaccctaacccgtttttagtcccacccactactgtccccgcggccgccaccgtagcagcagctgttactgagaatgcggctactccgtttagcttaacaatgccgacggagaacacttcagctgagcagctgaaaaagaagagaggtaggccgagaaagtataatcccgatgggactcttgtcgtgactttatcgccgatgccaatctcgtcctctgttccgttgacgtcggagtttcctccaaggaaacgaggaagaggacgtggcaagtctaatcgatggctcaagaagtctcaaatgttccaattcgatagaagtcctgttgataccaatttggcaggtgtaggaactgctgattttgttggtgccaactttacacctcatgtactgatcgtcaacgccggagaggatgtgacgatgaagataatgacattctctcaacaaggatctcgtgctatctgcatcctttcagctaatggtcccatctccaatgttacgcttcgtcaatctatgacatccggtggtactctaacttatgagggtcgttttgagattctctctttgacgggttcgtttatgcaaaatgactctggaggaactcgaagtagagctggtggtatgagtgtttgccttgcaggaccagatggtcgtgtctttggtggaggactcgctggtctctttcttgctgctggtcctgtccaggtaatggtagggacttttatagctggtcaagagcagtcacagctggagctagcaaaagaaagacggctaagatttggggctcaaccatcttctatctcctttaacatatccgcagaagaacggaaggcgagattcgagaggcttaacaagtctgttgctattcctgcaccaaccacttcatacacgcatgtaaacacaacaaatgcggttcacagttactatacaaactcggttaaccatgtcaaggatcccttctcgtctatcccagtaggaggaggaggaggtggagaggtaggagaagaagagggtgaagaagatgatgatgaattagaaggtgaagacgaagaattcggaggcgatagccaatctgacaacgagattccgagctgatgatgatcatacggtttcttttcgcggatttgttaggtttgatggatttcagattttggttgattgtttttattaacacagaatgtttagaagctgctatctttaggttcccatcctcttgtgattgttgagtatccttgttagaaacaaacttactgttgcaaaactctcttcaaaaaagtttcactttgctttccca

SEQ ID NO: 503 - protein, 404 aa, Arabidopsis thaliana
MEEREGTNINNNITSSFGLKQQHEAAASDGGYSMDPPPRPENPNPFLVPPTTVPAAATVAAAVTENAATPFSLTMPTENTSAEQLKKKRGRPRKYNPDGTLVVTLSPMPISSSVPLTSEFPPRKRGRGRGKSNRWLKKSQMFQFDRSPVDTNLAGVGTADFVGANFTPHVLIVNAGEDVTMKIMTFSQQGSRAICILSANGPISNVTLRQSMTSGGTLTYEGRFEILSLTGSFMQNDSGGTRSRAGGMSVCLAGPDGRVFGGGLAGLFLAAGPVQVMVGTFIAGQEQSQLELAKERRLRFGAQPSSISFNISAEERKARFERLNKSVAIPAPTTSYTHVNTTNAVHSYYTNSVNHVKDPFSSIPVGGGGGGEVGEEEGEEDDDELEGEDEEFGGDSQSDNEIPS

SEQ ID NO: 504 - DNA, 861 bp, Arabidopsis thaliana
ccttatcactcaccaaaagtcgtcacataatatcactttcgagttatcaacatccgtacatgtcatccatagagccaaaagtaatgatggttggtgctaataagaaacaacgaaccgtccaagctagttcgaggaaaggttgtatgagaggaaaaggtggacccgataacgcgtcttgcacttacaaaggtgttagacaacgcacttggggcaaatgggtcgctgagatccgcgagcctaaccgaggagctcgtctttggctcggtaccttcgacacctcccgtgaagctgccttggcttatgactccgcagctcgtaagctctatgggcctgaggctcatctcaacctccctgagtccttaagaagttaccctaaaacggcgtcgtctccggcgtcccagactacaccaagcagcaacaccggtggaaaaagcagcagcgactctgagtcgccgtgttcatccaacgagatgtcatcatgtggaagagtgacagaggagatatcatgggagcatataaacgtggatttgccggtaatggatgattcttcaatatgggaagaagctacaatgtcgttaggatttccatgggttcatgaaggagataatgatatttctcggtttgatacttgtatttccggtggctattctaattgggattcctttcattccccactttgaggtgtcactagactctctttaattgttaagttatcatatacaaactacatatatatacaaatatagtcaccgtgaactaggatatatatgtaaataaacaccagttacatgtacttatatatgtgcacatctatatatgtggtttgtctgtatagtgtgaaagcagattcttaccatatca

SEQ ID NO: 505 - protein, 206 aa, Arabidopsis thaliana
MSSIEPKVMMVGANKKQRTVQASSRKGCMRGKGGPDNASCTYKGVRQRTWGKWVAEIREPNRGARLWLGTFDTSREAALAYDSAARKLYGPEAHLNLPESLRSYPKTASSPASQTTPSSNTGGKSSSDSESPCSSNEMSSCGRVTEEISWEHINVDLPVMDDSSIWEEATMSLGFPWVHEGDNDISRFDTCISGGYSNWDSFHSPL

SEQ ID NO: 506 - DNA, 1306 bp, Arabidopsis thaliana
aaagtatcatctcatagattccatcttttctctattacatggagaagaaaaaagaagaggatcatcatcatcaacaacaacaacaacaacaaaaggagatcaagaacacagagacaaagatcgagcaagaacaagaacaagaacaaaaacaagaaatctctcaagcatcatcatcatcaaacatggcgaatctagttacgtcatcagatcatcatccgttggagctagctggaaatctctcaagcatcttcgatacttcatctttaccttttccttattcttatttcgaagatcactcttctaataatcctaattctttcctagacttgctccgacaagatcatcagtttgcttcttcctctaattcctcttctttttcattcgatgcctttcctctccccaataacaacaacaacacctctttttttacggatttgcccttacctcaagctgagtcatcagaagtcgtgaacacaacaccgacttctccaaactcaacctcagtctcatcttcctccaacgaagctgcaaatgataacaacagtggtaaagaagttactgttaaagatcaagaagaaggagatcaacaacaagagcaaaagggtactaagccacagttgaaggcaaagaagaagaatcaaaagaaagctagagaagctaggtttgcgtttctgacgaagagcgatattgataatcttgacgacggttataggtggagaaaatacggccaaaaagctgtcaaaaacagtccttatcccagaagctattaccgttgcaccacagtgggttgcggagtgaagaagagagtggagagatcctccgatgatccttcgatcgtcatgacaacctacgaaggtcagcatacccatcctttccccatgacgccacgtggacacatcggaatgctcacgtcaccaatcctagaccacggtgcaaccaccgcgtcatcatcatcattctccatccctcagccacgttacttgctgactcaacatcaccagccctacaacatgtacaacaacaactctctaagtatgatcaatagaagatcatccgatggcactttcgtaaatccaggtccatcatcatcattccccggctttggttatgatatgtctcaagcttctacttcaacttcttcttccattagagatcatggattgcttcaagatattcttccttcgcagatcagatccgatactattaacactcaaaccaatgaagagaataagaaatgaagaagttttttttcccggggcaattgtttttttctttaggccggatccggtaggtaggtttcatgagc

SEQ ID NO: 507 - protein, 399 aa, Arabidopsis thaliana
MEKKKEEDHHHQQQQQQQKEIKNTETKIEQEQEQEQKQEISQASSSSNMANLVTSSDHHPLELAGNLSSIFDTSSLPFPYSYFEDHSSNNPNSFLDLLRQDHQFASSSNSSSFSFDAFPLPNNNNNTSFFTDLPLPQAESSEVVNTTPTSPNSTSVSSSSNEAANDNNSGKEVTVKDQEEGDQQQEQKGTKPQLKAKKKNQKKAREARFAFLTKSDIDNLDDGYRWRKYGQKAVKNSPYPRSYYRCTTVGCGVKKRVERSSDDPSIVMTTYEGQHTHPFPMTPRGHIGMLTSPILDHGATTASSSSFSIPQPRYLLTQHHQPYNMYNNNSLSMINRRSSDGTFVNPGPSSSFPGFGYDMSQASTSTSSSIRDHGLLQDILPSQIRSDTINTQTNEENKK

SEQ ID NO: 508 - DNA, 1260 bp, Arabidopsis thaliana
gaaatttcatccctaaataagaaaaaagcatctccttctttagtgtcctccttcaccaaactcttgattccataagcatatattaaaaaagctctctgctttcttcaactttcccgggaaaatcttcttgttacaaagcatcaatctcttgttttaccaattttctctctttattccttttttgccctttacttttcctaactttggtctttatatataaacacacgacacaaagaagaacacacataagttaaaactattacaacagttttaaagagagagatttaaaaaatggagacagagaagaaagtttctctcccaagaatcttacgaatctctgttactgatccttacgcaacagattcgtcaagcgacgaagaagaagaagttgattttgatgcattatctacaaaacgacgtcgtgttaagaagtacgtgaaggaagtggtgcttgattcggtggtttctgataaagagaagccgatgaagaagaagagaaagaagcgcgttgttactgttccagtggttgttacgacggcgacgaggaagtttcgtggagtgaggcaaagaccgtggggaaaatgggcggcggagattagagatccgagtagacgtgttagggtttggttaggtacttttgacacggcggaggaagctgccattgtttacgataacgcagctattcagctacgtggtcctaacgcagagcttaacttccctcctcctccggtgacggagaatgttgaagaagcttcgacggaggtgaaaggagtttcggattttatcattggcggtggagaatgtcttcgttcgccggtttctgttctcgaatctccgttctccggcgagtctactgcggttaaagaggagtttgtcggtgtatcgacggcggagattgtggttaaaaaggagccgtcttttaacggttcagatttctcggcgccgttgttctcggacgacgacgtttttggtttctcgacgtcgatgagtgaaagtttcggcggcgatttatttggagataatctttttgcggatatgagttttggatccgggtttggattcgggtctgggtctggattctccagctggcacgttgaggaccattttcaagatattggggatttattcgggtcggatcctgtcttaactgtttaagaaataactggccgtttaacggcgtttagtgaagttttgttaccggcgacggcgaggattaaaaaaaaacggcgatttattttttgaatgaagatttgttaaata

SEQ ID NO: 509 - protein, 287 aa, Arabidopsis thaliana
METEKKVSLPRILRISVTDPYATDSSSDEEEEVDFDALSTKRRRVKKYVKEVVLDSVVSDKEKPMKKKRKKRVVTVPVVVTTATRKFRGVRQRPWGKWAAEIRDPSRRVRVWLGTFDTAEEAAIVYDNAAIQLRGPNAELNFPPPPVTENVEEASTEVKGVSDFIIGGGECLRSPVSVLESPFSGESTAVKEEFVGVSTAEIVVKKEPSFNGSDFSAPLFSDDDVFGFSTSMSESFGGDLFGDNLFADMSFGSGFGFGSGSGFSSWHVEDHFQDIGDLFGSDPVLTV

SEQ ID NO: 510 - DNA, 1005 bp, Arabidopsis thaliana
atggtgaaaaaaggtggcacgaagaggaagattgcgattgagacgatacagaagagagattcccttagggttacctgcaccaaacgccgtgaaggtctctatagcaaagcctctcagctttgtcttctctcagacgcacagatcgctatcttagcgactcctccttcttctgaatccaacgtatccttctactctttcggtcactcctctgttgatgccgttgtctctgcttttctctccggacaacgtcctgttccgaaggataacaaagagacgagggaggacgttggtatctgtttgactcgcaataatctagggttaggtttttggtggaacgacgagagccttgccagatcggagaatcctcaagagattagtgaagcgatcgactctatgcggacgctgttgaggaatctcaaggaattgcgtgcggatgaagctttagcctgtaatcaagctttcgttaatgatcgcgaggacctgaagaacaacgacaagtgcgattttgtttcagaccacgaaactcatgatcaaaccctaattcttcagtccgcttctccaatttgttgcatcccagaaaatctcaacgagattactcaagagccaaatcaaaccctaaatattcagtcgagtacttctgcaatttgttgcgtccctgataattcacctgaaaatttcaatgagatcactgaagaacaagatcagattcgctcgatttgtgaaactttttgtgttatggataacaacgctgctttacctgaaatgaacctggattacgatcaagacattggcttcgacacgccttttgagagcgcgctaaatgattggttttcggacaacactactcatcaggagattagtgcaagtattttgaacgctgttgttgatgatcaagtctcggtggatctaactccgttttcttattttcagagatgtttggatggagataatctacgattctctgattgtttcaaagactttgcaaacactatttcagcactttga

SEQ ID NO: 511 - protein, 334 aa, Arabidopsis thaliana
MVKKGGTKRKIAIETIQKRDSLRVTCTKRREGLYSKASQLCLLSDAQIAILATPPSSESNVSFYSFGHSSVDAVVSAFLSGQRPVPKDNKETREDVGICLTRNNLGLGFWWNDESLARSENPQEISEAIDSMRTLLRNLKELRADEALACNQAFVNDREDLKNNDKCDFVSDHETHDQTLILQSASPICCIPENLNEITQEPNQTLNIQSSTSAICCVPDNSPENFNEITEEQDQIRSICETFCVMDNNAALPEMNLDYDQDIGFDTPFESALNDWFSDNTTHQEISASILNAVVDDQVSVDLTPFSYFQRCLDGDNLRFSDCFKDFANTISAL

SEQ ID NO: 512 - DNA, 1293 bp, Arabidopsis thaliana
atgggaacaagagcagaacgcaaggaagattttgttggtgggtttggatttggtgttgtagaaaattcgcataaagacgttatggtgctacctcatcatcactattatccatcatattcatcaccttcctcttcttctttgtgttactgttctgctggtgttagcgatcccatgttctctgtttctagcaatcaggcttacacttcttctcacagtggtatgttcacacccgccggttctggttctgctgctgtgactgtagcagatccttttttctccttgagctcttcaggggaaatgagaagaagtatgaacgaagatgctggtgcagctttcagcgaagctcaatggcatgagcttgagaggcagaggaatatatacaagtacatgatggcttctgttcctgttcctccagagcttctcacaccctttcccaagaaccaccaatcaaacactaacccggatgtaactgtggcagtggcgacaggaggctcattgcagctggggattgcttcaagcgcaagcaataacacggctgatctggagccatggaggtgcaagagaacagatgggaagaaatggaggtgctctagaaacgtgattcctgatcagaaatactgtgagagacacacacacaagagccgtcctcgttcaagaaagcatgtggaatcatctcaccaatcatctcaccacaatgacattcgtacggctaagaatgatactagccagcttgtgagaacttatcctcagttttacggacaacctataagccagatccctgtgctttctactcttccgtctgcctcctctccatatgatcaccacagaggactgaggtggtttacgaaagaagatgatgccattggaaccttaaacccggagactcaagaagctgtccagctgaaagttggatcaagcagagagctcaaacggggattcgattatgatctgaatttcaggcagaaagagccaatagtagaccagagctttggagcattgcagggtctattaagtctaaaccagacaccacaacataaccaagaaacaagacagtttgttgtagaaggaaagcaagatgaagcgatgggaagctctctgacactctcaatggctggaggaggcatggaggaaacagagggaacaaaccagcatcagtgggttagccatgaaggtccatcatggctctattcaacaacaccaggtggaccattggctgaagcactgtgtctcggtgtctccaacaacccaagttctagtactactactagtagctgcagcagaagctcaagctaa

SEQ ID NO: 513 - protein, 430 aa, Arabidopsis thaliana
MGTRAERKEDFVGGFGFGVVENSHKDVMVLPHHHYYPSYSSPSSSSLCYCSAGVSDPMFSVSSNQAYTSSHSGMFTPAGSGSAAVTVADPFFSLSSSGEMRRSMNEDAGAAFSEAQWHELERQRNIYKYMMASVPVPPELLTPFPKNHQSNTNPDVTVAVATGGSLQLGIASSASNNTADLEPWRCKRTDGKKWRCSRNVIPDQKYCERHTHKSRPRSRKHVESSHQSSHHNDIRTAKNDTSQLVRTYPQFYGQPISQIPVLSTLPSASSPYDHHRGLRWFTKEDDAIGTLNPETQEAVQLKVGSSRELKRGFDYDLNFRQKEPIVDQSFGALQGLLSLNQTPQHNQETRQFVVEGKQDEAMGSSLTLSMAGGGMEETEGTNQHQWVSHEGPSWLYSTTPGGPLAEALCLGVSNNPSSSTTTSSCSRSSS

SEQ ID NO: 514 - DNA, 1319 bp, Arabidopsis thaliana
ctagtagtgatgatatgatcgcttcttctcctacaatctcagaaacctccgatcacggttttagatatcttctacaacggatacaatggagagcaccgattcttccggtggtccaccaccgccacaacctaaccttcctccaggcttccggtttcaccctaccgacgaagagcttgttgttcactacctcaaacgcaaagcagcctctgctcctttacctgtcgccatcatcgccgaagtcgatctctataaatttgatccatgggaacttcccgctaaagcatcgtttggagaacaagaatggtacttctttagtccacgagatcggaagtatccaaacggagcaagaccaaacagagcggcgacttcaggttattggaaagcgaccggtacagataaaccggtacttgcttccgacggtaaccaaaaggtgggcgtgaagaaggcactagtcttctacagtggtaaaccaccaaaaggcgttaaaagtgattggatcatgcatgagtatcgtctcatcgaaaacaaaccaaacaatcgacctcctggctgtgatttcggcaacaaaaaaaactcactcagacttgatgattgggtgttatgtagaatctacaagaagaacaacgcaagtcgacatgttgataacgataaggatcatgatatgatcgattacattttcaggaagattcctccgtctttatcaatggcggctgcttctacaggacttcaccaacatcatcataatgtctcaagatcaatgaatttcttccctggcaaattctccggtggtggttacgggattttctctgacggtggtaacacgagtatatacgacggcggtggcatgatcaacaatattggtactgactcagtagatcacgacaataacgctgacgtcgttggtttaaatcatgcttcgtcgtcaggtcctatgatgatggcgaatttgaaacgaactctcccggtgccgtattggcctgtagcagatgaggagcaagatgcatctccgagcaaacggtttcacggtgtaggaggaggaggaggagattgttcgaacatgtcttcctccatgatggaagagactccaccattgatgcaacaacaaggtggtgtgttaggagatggattattcagaacgacatcgtaccaattacccggtttaaattggtactcttcttaatcaaatgtgtttcgccgccggtgtgaagaattttccggtgacagtgaagatttttttccgattggtggggtcatttgcatgcattatataatttgagatttgtgtatatgttttgggttaattaattggtcacaggggc

SEQ ID NO: 515 - protein, 364 aa, Arabidopsis thaliana
MESTDSSGGPPPPQPNLPPGFRFHPTDEELVVHYLKRKAASAPLPVAIIAEVDLYKFDPWELPAKASFGEQEWYFFSPRDRKYPNGARPNRAATSGYWKATGTDKPVLASDGNQKVGVKKALVFYSGKPPKGVKSDWIMHEYRLIENKPNNRPPGCDFGNKKNSLRLDDWVLCRIYKKNNASRHVDNDKDHDMIDYIFRKIPPSLSMAAASTGLHQHHHNVSRSMNFFPGKFSGGGYGIFSDGGNTSIYDGGGMINNIGTDSVDHDNNADVVGLNHASSSGPMMMANLKRTLPVPYWPVADEEQDASPSKRFHGVGGGGGDCSNMSSSMMEETPPLMQQQGGVLGDGLFRTTSYQLPGLNWYSS

SEQ ID NO: 516 - DNA, 1272 bp, Arabidopsis thaliana
atgatgaaaggtctgattgggtatagatttagtccgacgggagaggaagtgatcaaccattacctaaagaacaaacttctgggtaagtattggctcgttgatgaagctattagcgagatcaacatcttgagtcacaaacccagcaaggatttgcctaagttagctaggatccaatcggaagatcttgaatggtatttcttctctccgattgagtacacgaacccgaataagatgaaaatgaagaggacgacaggttctgggttttggaaacctactggtgttgatcgggaaattagggataaaagaggaaatggtgttgtgatagggattaagaagacgcttgtgtaccatgaaggtaagagtcctcatggagttagaactccttgggttatgcacgagtatcacatcacttgcttgcctcatcataagaggaaatatgttgtctgccaagtaaagtataagggtgaagctgcagaaatttcatatgagccaagtccctctttggtatccgattcgcataccgtcatagcgattaccggagaaccggaacctgagcttcaggttgagcagccaggtaaagaaaatctcttgggtatgtctgtagatgatttgatagaaccaatgaaccaacaagaggagccacaaggtcctcacttagctccgaatgatgatgagtttatacgtggattgaggcatgttgatcgagggacggttgaatatttgtttgccaatgaagaaaacatggatggtttgtctatgaatgacttgagaatcccaatgatcgtccaacaagaggatctctctgagtgggagggatttaacgcagacacctttttcagcgacaacaacaataactataaccttaacgtgcatcatcaactaacgccttacggcgatggctatttgaatgcattttcgggttataacgaagggaatcctcccgatcacgaattagtgatgcaagagaaccgcaacgatcacatgccaaggaaacctgtgacagggaccattgattatagcagcgatagtggcagtgatgctggatccatatctacaacggtgaaacaagaaatcccaagagctgttgatgcacccatgaacaatgagtcatctttggtgaaaacagagaagaaaggcttgtttattgtagaggacgcaatggagagaaaccgcaagaaaccacgatttatctatctcatgaagatgatcataggcaacatcatatcggttttactacccgtcaaaagattgatcccggtgaagaagttatga

SEQ ID NO: 517 - protein, 423 aa, Arabidopsis thaliana
MMKGLIGYRFSPTGEEVINHYLKNKLLGKYWLVDEAISEINILSHKPSKDLPKLARIQSEDLEWYFFSPIEYTNPNKMKMKRTTGSGFWKPTGVDREIRDKRGNGVVIGIKKTLVYHEGKSPHGVRTPWVMHEYHITCLPHHKRKYVVCQVKYKGEAAEISYEPSPSLVSDSHTVIAITGEPEPELQVEQPGKENLLGMSVDDLIEPMNQQEEPQGPHLAPNDDEFIRGLRHVDRGTVEYLFANEENMDGLSMNDLRIPMIVQQEDLSEWEGFNADTFFSDNNNNYNLNVHHQLTPYGDGYLNAFSGYNEGNPPDHELVMQENRNDHMPRKPVTGTIDYSSDSGSDAGSISTTVKQEIPRAVDAPMNNESSLVKTEKKGLFIVEDAMERNRKKPRFIYLMKMIIGNIISVLLPVKRLIPVKKL

SEQ ID NO: 518 - DNA, 1034 bp, Arabidopsis thaliana
  misc_feature (1029)..(1029): n is a, c, g, or t
cgtcgaccttcactcaaaccctaatcccgggaacccgggaattttgatcattttgtttcttttcgatctgtttctattttaaaaagatgatgaaagatccgactgggtatagatttagtccgacgggagaggaagtgataaaccattacctaaagaacaaaattctgggtaagacttggctcgttgatgaagccattagcgagatcaacatcttgaatcacaaacccagcaaggatttgcctaagttagctaggatccaatcggaagatcttgagtggtactttttctctccgattgagtacacgaacccgaataagatgaaaatgaagaggacgacaggttctgggttttggaaacctagtggtgttgatcggaaaattagggataaaagaggaaatggtgttgtgatagggattaagaagacgcttgtgtaccatgaaggtaagagtcctcatggagttagaactccttgggttatgcacgagtatcacatcacttgcttgcctcatcataagaggaaatatgttgtctgccaagtaaagtataagggtgaagctgcagaaatttcatatgagccaagtccctctttggtatccgattcgcataccgtcatagcgattaacggagaaccggaacctgagcttcaggttgagcagccaggtaaagaaaatctcttgggtatgtctgtagatgatttgatagaaccaatgaaccaacaagaggagccacaaggtcctcacttagctccgaatgatgatgagtttatacgtggattgagacatgttgatcgagagccggttgaatatttgtttgccaatgaagaaaacatggatggtttgtctattatgaatgacttgacaatcccaatgatcgcccaacaagaggatctcattctctctgagtgggagggatttatcgcagccacctttttcagcgacaacaacaataacaataaccttaacgtgcatcaactaacgtctttcttaccgggatgattatcagaatgcattttgggttacaacggagcgnccgct

SEQ ID NO: 519 - protein, 302 aa, Arabidopsis thaliana
MMKDPTGYRFSPTGEEVINHYLKNKILGKTWLVDEAISEINILNHKPSKDLPKLARIQSEDLEWYFFSPIEYTNPNKMKMKRTTGSGFWKPSGVDRKIRDKRGNGVVIGIKKTLVYHEGKSPHGVRTPWVMHEYHITCLPHHKRKYVVCQVKYKGEAAEISYEPSPSLVSDSHTVIAINGEPEPELQVEQPGKENLLGMSVDDLIEPMNQQEEPQGPHLAPNDDEFIRGLRHVDREPVEYLFANEENMDGLSIMNDLTIPMIAQQEDLILSEWEGFIAATFFSDNNNNNNLNVHQLTSFLPG

SEQ ID NO: 520 - DNA, 804 bp, Arabidopsis thaliana
atgcatggagccatgaactcaccatgcattgatttcgtaatgttcagtcgtggacaacacgatgaggacaacatgtcacgtcgtcctccgtggaagagggagagatcgatgtccactcagcatcatcatcttaacttgtctccaaacgaagacgaagagcttgccaactgtcttgtcttgttgtccaattcaggggatgcgcatggtggtgatcagcataaacaacatggacatggtaagggcaaaaccgtcaaaaagcaaaaaaccgcccaggttttccaatgcaaagcttgcaagaaggtgttcacgtcgcatcaggcattgggtggacacagggcaagccacaagaaagtgaagggttgttttgcctctcaagataaagaagaggaagaggaagaggaatacaaagaagacgacgacgacaacgacgaggacgaagatgaggaggaggatgaggaagacaaatcaacggctcatatcgcaagaaagagatccaacgctcacgaatgcaccatctgccatcgcgtcttctcttcgggacaggccttaggaggccacaagcgatgccattggctaacaccttccaattatcttcgtatgacgtcgctccacgatcatcatcattccgtcggcagaccgcagccgttagatcaaccatctctcgatctcaacttagcttgccaagaatattccgtcgatccaacggccatgagcgtagggatgatcgagagagatggtggtggcaataatcacaacgctacttcatcttcgtggttaaaactcgcaagtggtgattggtcttga

SEQ ID NO: 521 - protein, 267 aa, Arabidopsis thaliana
MHGAMNSPCIDFVMFSRGQHDEDNMSRRPPWKRERSMSTQHHHLNLSPNEDEELANCLVLLSNSGDAHGGDQHKQHGHGKGKTVKKQKTAQVFQCKACKKVFTSHQALGGHRASHKKVKGCFASQDKEEEEEEEYKEDDDDNDEDEDEEEDEEDKSTAHIARKRSNAHECTICHRVFSSGQALGGHKRCHWLTPSNYLRMTSLHDHHHSVGRPQPLDQPSLDLNLACQEYSVDPTAMSVGMIERDGGGNNHNATSSSWLKLASGDWS

SEQ ID NO: 522 - DNA, 915 bp, Arabidopsis thaliana
atgtattcacttctcaagaaaacaaaaatctgtcaggtgtgcaagaaatcattttcaaacgggaaagctcttggtggtcacatgagagctcacactttgaaatttttccctggatcatcttcatcaactggctcgatcactccatcactacgatcatgcaacaaccttggagcaagctttagaagacctaatgaaacagttctggcgagatttgtccacaccagtgaagttgttggtggtccaaagccagatctaaacaaagaagctgagcaacgaacaactgtcaagaaaaagatcgtcgtggatttggaagaggaaaattcgatagagtctgaaagcgatataactattgaagaaagtgctttatgtcttttacaaatgaaggatgacaacatgtcagaatatcttcagaatctgaaatcgattgatagtttggtatcaactcgaaaaagaaaagatactgaaaactatatcgaaatagattctgatgaaaatcacgaagatagtgatgatgagtacgttgttgaagatgaagatgaagacaatgaagatgacgatgttaagtctctcacttcagatgtggaaaacctaataggagacagcgatgaagatgatgatgattatggtgatgaaaacgcatattacggtggaaaaaggaaaaggggtaagaaacaaagtaaatatacgtgtgatacttgtggaaaagttttacgttcgtatcaggcattaggtggtcatcgaacgagccacaaatacaagcgattgaagatttccgacaagaattatttcggggaagatgggccaatagttcgacgacaatacgagtgtcaaatttgtaacagaatgtttgcatctggtcaagcacttggtggtcacaaaaagattcactatatgttcctagctccagccaagtaa

SEQ ID NO: 523 - protein, 304 aa, Arabidopsis thaliana
MYSLLKKTKICQVCKKSFSNGKALGGHMRAHTLKFFPGSSSSTGSITPSLRSCNNLGASFRRPNETVLARFVHTSEVVGGPKPDLNKEAEQRTTVKKKIVVDLEEENSIESESDITIEESALCLLQMKDDNMSEYLQNLKSIDSLVSTRKRKDTENYIEIDSDENHEDSDDEYVVEDEDEDNEDDDVKSLTSDVENLIGDSDEDDDDYGDENAYYGGKRKRGKKQSKYTCDTCGKVLRSYQALGGHRTSHKYKRLKISDKNYFGEDGPIVRRQYECQICNRMFASGQALGGHKKIHYMFLAPAK

SEQ ID NO: 524 - DNA, 735 bp, Arabidopsis thaliana
atggagaaccaatctatgtcttcatcaagctcctccacacacaaacatgatcaaaaactcaaaagttccgttgtggccatggaggtcctggaggagaaggagacagtgaacaatccgccccagtattataataagatctacatctgttacttgtgcaagagagcgttcccaacccctcatgcccttggcggtcacggaaccacccacaaggaggaccgagaattggagaggcaacagatcgagtcaaggctttctaacaaagacaagtctaacttgctctttggtgggtcttcacaagatgttttatcaaatgataatcaccttggactctctcttggtccattgaagtccatagaaggtagcagcagcagcaacaacgttaacccattgcttaatgttggagtccctagaggaaccacagatatgaacatgaacaactatagctcacatgctttatcaactgatgatattaatcttgatcttactcttggtccatctaagtccataggagatagcaacaatatcattaataacaacactaactcatccttcgatgggaatctgatcattcccgttcgtcctcgtgtgtctagataccattttgttgctgggaacccccttgattcaatctctagaaacattcctccttctattacttttcctcatctaaacatcaatctttctcatgattcgttttctttacaagagaatggttcgggctctagtcactcataa

SEQ ID NO: 525 - protein, 244 aa, Arabidopsis thaliana
MENQSMSSSSSSTHKHDQKLKSSVVAMEVLEEKETVNNPPQYYNKIYICYLCKRAFPTPHALGGHGTTHKEDRELERQQIESRLSNKDKSNLLFGGSSQDVLSNDNHLGLSLGPLKSIEGSSSSNNVNPLLNVGVPRGTTDMNMNNYSSHALSTDDINLDLTLGPSKSIGDSNNIINNNTNSSFDGNLIIPVRPRVSRYHFVAGNPLDSISRNIPPSITFPHLNINLSHDSFSLQENGSGSSHS

SEQ ID NO: 526 - DNA, 813 bp, Arabidopsis thaliana
atgaacaaccaatctatgtcttcttcaagctcctcctccccacacaaacatgatcaaaaactcaaaagtgcccttgtggccgtggaggagaaggagacaataaacaatccgaaacaaaggtctcctcaagagattgtgtctgaaaggacaaaccttgagatgcctagtttcagattaagttttttccgaaagaaaagagataccgtgctaatacatcctcccaaggataacaagatcagccacacctgtcgtttctgcaagaggaatttcaaaagctgttttgccctaggcggtcacatgaagtgccacaaaaaggaacgagaattggagaagcagcgaaagataatcgaggatgcgatgctttgtgatagtactcctttcaccttgcaaaggcttcctgttggcccttgtaagtatggccaaggtggtagctcacatgctttatcaactgatggtattaatcttgatctaactcttggtccatccaagtccacaggaggcagcaacaatagcactaataacaacactaactcatcgttccatgggaatctaatgactcccgtgggtccttgtgtgcctagatacagtttggttgctggaaaccaggttgattcaagcaatatacatgttcctgcttatccaaccaccgatctttgttatgatttttttgctttacaagagcatggttcgggctctagtcactcaaaaagtctcatctcaaaggggaaaaacaaagtcatggtgcctgaagatgatgaggatatcgggatgataaggtggttgcccaagaaaaaaagatcaagaggagagtag

SEQ ID NO: 527 - protein, 270 aa, Arabidopsis thaliana
MNNQSMSSSSSSSPHKHDQKLKSALVAVEEKETINNPKQRSPQEIVSERTNLEMPSFRLSFFRKKRDTVLIHPPKDNKISHTCRFCKRNFKSCFALGGHMKCHKKERELEKQRKIIEDAMLCDSTPFTLQRLPVGPCKYGQGGSSHALSTDGINLDLTLGPSKSTGGSNNSTNNNTNSSFHGNLMTPVGPCVPRYSLVAGNQVDSSNIHVPAYPTTDLCYDFFALQEHGSGSSHSKSLISKGKNKVMVPEDDEDIGMIRWLPKKKRSRGE

SEQ ID NO: 528 - DNA, 861 bp, Arabidopsis thaliana
atgaagagaacaagagacctttatggtgatgaatcttcttcatcggaatctgaagagtttcaccgggaaaaaatccgggtgaaggtgaagttaccggaagaaagaagtgaagatgaagatgagtctcctcagcctcagaggaagcacttttgtgtgatttgtgagaagcagtttagctctggtaaggcttatggtggtcacgtgaggatccactccattgagtacaataacaagggaaagatgaagaagatgaagaagatgaagttgaagaagaagaagaagagaaagattggtttggtgaagaaagagaaggagaaagagatagatctggctaggactgacgtggaaggtaagattaggtgttgtctttgtggaaaagagtttcaaacaatgcactctttgtttggtcatatgaggagacatcctgaccggacttggaaagggatacgacctcctccaccatcggagaagttcaatctaagctacttggatgatgatgtcgatgatgaagatgaggatgatgatgatgtgatgagtagatccatgatgatgagtgatgtacccgaggatgttcagggagctgcttgcattctaatgatgctctcttacgcttcaagaaattactgggctgggatagaggaatcaccaaaatccgaggtaagaagttcgagtttctacaaagatgatgaaggaaaagataaagtattaggagatagtaggatggatgaaaagaagggtttgattgtagatatgaagataaagatggaaatggaagtgaaggtgaatagtcctcgagatgaagctaagaggtcattagggtttgatctcaatcagcctccttaccatgaagatcatccttaa

SEQ ID NO: 529 - protein, 286 aa, Arabidopsis thaliana
MKRTRDLYGDESSSSESEEFHREKIRVKVKLPEERSEDEDESPQPQRKHFCVICEKQFSSGKAYGGHVRIHSIEYNNKGKMKKMKKMKLKKKKKRKIGLVKKEKEKEIDLARTDVEGKIRCCLCGKEFQTMHSLFGHMRRHPDRTWKGIRPPPPSEKFNLSYLDDDVDDEDEDDDDVMSRSMMMSDVPEDVQGAACILMMLSYASRNYWAGIEESPKSEVRSSSFYKDDEGKDKVLGDSRMDEKKGLIVDMKIKMEMEVKVNSPRDEAKRSLGFDLNQPPYHEDHP

SEQ ID NO: 530 - DNA, 944 bp, Arabidopsis thaliana
caatattgtcatatacaatggagaaacctggtggcttctggatccccaagaaaagcaacaaagagtcatcttgggaagagctggcctttgcagaagacgatgccgccggatctttgtggccgccaagatcttatacgtgtagcttctgccggagagaatttaaatcggctcaagccctcggtggccatatgaacgttcaccgaagagacagagcacggcttaagcaagccgacgaccaatacttattccccaaatcttcttcgtctccagagtatccatctcataaagatagcgataatattcatgaaacctcttgctatactttggtttttaacaccaaacctaattattttaagactcaacactcttgtgttattgatctttcttcgtcttcttctttaccatatttgactccttctagggtttcttctggtttgcctggaaagcaacatacttcttcttctcctccttctttcgttgtagaaccttccaagaactctaaatatattccctcttcttccccatggtcgtgcccaagtactgttgtggagcaaaagagttgtgatctatatgaaattccggctatggaaggagaaaagaagagaaagactgagagtgatgtgccaaaaatcgggcataaagcaaaacttagtcttggaaacaccactgatctctcggtgagtatgaatctggtcatccaccaaagttttccgattactgctcacggtagcgatgaagagattggtagggtggatatccgtaaaagaagacgaagacatgagagtccgtcgcagcagtcgattttcatttcaagtttatcttgtaagagtgacataattacaagaaacgaggaaagcaaacacaaaggtgatcgctttgaggatttagatcttgagcttaggctagggactgatccaccaaaaggaatttgattgatggaccga

SEQ ID NO: 531 - protein, 304 aa, Arabidopsis thaliana
MEKPGGFWIPKKSNKESSWEELAFAEDDAAGSLWPPRSYTCSFCRREFKSAQALGGHMNVHRRDRARLKQADDQYLFPKSSSSPEYPSHKDSDNIHETSCYTLVFNTKPNYFKTQHSCVIDLSSSSSLPYLTPSRVSSGLPGKQHTSSSPPSFVVEPSKNSKYIPSSSPWSCPSTVVEQKSCDLYEIPAMEGEKKRKTESDVPKIGHKAKLSLGNTTDLSVSMNLVIHQSFPITAHGSDEEIGRVDIRKRRRRHESPSQQSIFISSLSCKSDIITRNEESKHKGDRFEDLDLELRLGTDPPKGI

SEQ ID NO: 532 - DNA, 414 bp, Arabidopsis thaliana
atggagtgtgagagatcatcgtcgtccacgtcatcagaaaccggagcagtcaggcaccgtcgtacgtcgtcgtcgtcagtctccaccgtgacgagacgaatgtacgagtgcactttctgcaaaagaggtttcacaaacgcacaagctttaggtggtcatatgaacatccatcgacgtgaccgtctcaacaaggccaaggtgcaaaacgatgctgacgtggcactctcgcaaactcatagatgtttccacgtggcgtctgaccttggaggctacgagcaagtagactccgtcgtgttgaggacgacgacctcgaactacatccaacacttacgaatcggctcgatggctacaaggagagaaaacgtcgtcgttgaaggaaatgaaatcgatttggagctgcgtcttggcttatga

SEQ ID NO: 533 - protein, 137 aa, Arabidopsis thaliana
MECERSSSSTSSETGAVRHRRTSSSSVSTVTRRMYECTFCKRGFTNAQALGGHMNIHRRDRLNKAKVQNDADVALSQTHRCFHVASDLGGYEQVDSVVLRTTTSNYIQHLRIGSMATRRENVVVEGNEIDLELRLGL

SEQ ID NO: 534 - DNA, 606 bp, Arabidopsis thaliana
atgttgtcctcggactcgaattacgctagtgatattagcgacgatgcctccgccaccggatcgatagagaatcctatatacaaatgcaagtattgtcctaggaagttcgataaaacacaagcattaggtggtcatcaaaatgcacacagaaaggagagagaggtcgaaaaacaacaaaaagcatttttggcgcatttgaaccgaccagaaccagatctttacgcgtactcgtattcgtatcatcattcatttcctaaccaatacgcactcccaccgggatttgaacagcctcagtacaaagttgatagatcatacaagatgtccatggtctacaaccaatatgtgggatcctcaagctctagctttgcaggactacaaagtgacccaagtcaaggaatgaaccaggattggacctttaccgggatcccattcctaccccaatctcaacctcaaccactatcgtcaccaatatgtttggatctttgccttggcattggtagctcccaaacccaaccacaacctcaagaaccaaatgatgcaacagaagagatggatgctgagaaagaaaatgatggttcttccctttctctctcactcaaactgtga

SEQ ID NO: 535 - protein, 201 aa, Arabidopsis thaliana
MLSSDSNYASDISDDASATGSIENPIYKCKYCPRKFDKTQALGGHQNAHRKEREVEKQQKAFLAHLNRPEPDLYAYSYSYHHSFPNQYALPPGFEQPQYKVDRSYKMSMVYNQYVGSSSSSFAGLQSDPSQGMNQDWTFTGIPFLPQSQPQPLSSPICLDLCLGIGSSQTQPQPQEPNDATEEMDAEKENDGSSLSLSLKL

SEQ ID NO: 536 - DNA, 1131 bp, Arabidopsis thaliana
cgtcgacaccaccatctctatctctctcttaatcgatcgatgaagatcaggtgcgacgtctgcgataaagaagaagcgtcggtgttttgcacggccgacgaagcatctctctgcggcggctgcgaccaccaagtccaccacgctaacaaactcgcctctaaacatctccgtttctctctcctttatccttcttcttccaacacctcctctcctctctgcgacatctgtcaggataaaaaagctctgttgttctgtcaacaagatagagctattttatgcaaagattgcgattcatcgatccacgctgcgaacgaacacacaaagaaacacgataggtttcttcttacaggggttaagctctctgcaacatcgtctgtttacaaacctacttcgaaatcttcttcttcttcttcaagcaaccaagatttctctgtccctggatcatcaatctctaatcctcctcctctcaagaaacctctctcagctcctcctcagagcaacaagatccaacccttttcgaagatcaacggcggtgatgcgtcggtgaatcagtggggatccacaagcacgatttctgagtatttgatggatacgttacctggttggcacgttgaggatttcctcgattcctctcttcctacttatggtttctctaagagtggtgatgatgatggagtgttaccatatatggaaccagaagatgacaacaacactaagagaaacaacaacaacaacaacaacaacaacaacaatacagtgtcacttccatctaagaatttagggatttgggtccctcagattccacaaactcttccttcttcatacccaaatcaatacttttctcaagacaacaacatacagtttgggatgtacaacaaagaaacatcaccagaagtagtgtcttttgctccaatacaaaacatgaaacaacaaggacagaacaacaagagatggtatgatgatggtggcttcactgtcccacagatcactcctcctcctctttcttctaataaaaagtttagatctttctggtaattttactatcttccctaaatgggggagttttttttttgtttgtttgtttctccttcatttctcccaactttgatctcagaattaggcgcggccgct

SEQ ID NO: 537 - protein, 331 aa, Arabidopsis thaliana
MKIRCDVCDKEEASVFCTADEASLCGGCDHQVHHANKLASKHLRFSLLYPSSSNTSSPLCDICQDKKALLFCQQDRAILCKDCDSSIHAANEHTKKHDRFLLTGVKLSATSSVYKPTSKSSSSSSSNQDFSVPGSSISNPPPLKKPLSAPPQSNKIQPFSKINGGDASVNQWGSTSTISEYLMDTLPGWHVEDFLDSSLPTYGFSKSGDDDGVLPYMEPEDDNNTKRNNNNNNNNNNNTVSLPSKNLGIWVPQIPQTLPSSYPNQYFSQDNNIQFGMYNKETSPEVVSFAPIQNMKQQGQNNKRWYDDGGFTVPQITPPPLSSNKKFRSFW

SEQ ID NO: 538 - DNA, 1020 bp, Arabidopsis thaliana
atggaacaagccgcgttgaagagcagcgtcaggaaagagatggctctcaaaacgacttctccggtttacgaagagtttcttgccgtcaccaccgctcaaaatggcttttccgtcgacgatttctctgtagacgacttgcttgacttgtcaaacgatgacgtttttgccgacgaagaaactgacctcaaggctcaacatgagatggtccgtgtttcctctgaggaacccaacgacgacggagacgctcttcgccggagcagcgatttctccggctgtgacgactttggttctctccctacaagcgaactctctcttccggcggatgatttagcgaaccttgagtggctctctcatttcgtggaggactccttcacggaatattcgggtccaaacctcaccggaaccccgactgagaaaccggcgtggttaacgggtgaccggaaacatcctgtgactgcagtcacggaagagacctgtttcaaatcccctgttccggctaaagcccgtagcaaacgtaaccgcaatggcctcaaggtctggtcgcttggttcgtcgtcctcctcgggtccttcctcgtccggttcgacctcctcctcctcttcgggtccttccagcccgtggttctccggcgctgagctgctcgagcctgtggtcacgtcagagaggccaccgtttcccaagaagcataagaaaaggtcagccgagtctgttttctccggtgagctgcagcagctgcaacctcagcgaaagtgcagccactgcggcgttcagaaaactccgcagtggagagccgggccaatgggagccaagaccctgtgcaatgcgtgcggtgtccggtacaagtcgggtaggttgctaccggaatacagacccgcttgtagcccgacattctcgagtgagctgcactcgaaccaccaccggaaagtcatagagatgaggcggaagaaggagccaaccagtgacaacgaaaccggtttaaaccagctggttcagtccccacaagctgtaccaagtttttga

SEQ ID NO: 539 - protein, 339 aa, Arabidopsis thaliana
MEQAALKSSVRKEMALKTTSPVYEEFLAVTTAQNGFSVDDFSVDDLLDLSNDDVFADEETDLKAQHEMVRVSSEEPNDDGDALRRSSDFSGCDDFGSLPTSELSLPADDLANLEWLSHFVEDSFTEYSGPNLTGTPTEKPAWLTGDRKHPVTAVTEETCFKSPVPAKARSKRNRNGLKVWSLGSSSSSGPSSSGSTSSSSSGPSSPWFSGAELLEPVVTSERPPFPKKHKKRSAESVFSGELQQLQPQRKCSHCGVQKTPQWRAGPMGAKTLCNACGVRYKSGRLLPEYRPACSPTFSSELHSNHHRKVIEMRRKKEPTSDNETGLNQLVQSPQAVPSF

SEQ ID NO: 540 - DNA, 1047 bp, Arabidopsis thaliana
cacaaccccaaaaatagacctcacctctctcgtcttctctattctctccgctccttaatttccaattccaaccttctctgttttgccttgatggaaaagatagctccggagctcttcctcgtcgccggtaacccggactctttcgtcgtcgacgacctcctcgacttctctaacgacgacggcgaagttgacgacggcttaaacactcttcccgattcttcaacactctccaccggcactctcaccgacagttccaactcctcctcgcttttcaccgacggcactggcttctccgacctatatattccgaatgacgatatagcagaattagaatggttatcaaattttgtggaagaatcattcgcaggagaagaccaagacaagcttcacttattttccggtttaaaaaaccctcaaaccaccgggtcgaccctgacccacttaattaaacccgaacccgaacttgatcatcaattcatcgacatcgatgaatccaacgtcgccgttcctgccaaggccagaagcaagagatcacgttctgcagcctccacgtgggcttcccgtcttttatccttagccgattccgacgaaaccaatcccaagaagaaacaacgaagagtgaaagaacaagacttcgccggagatatggacgtggattgcggagaaagcggaggaggacgacgttgtttgcactgcgcgacggagaagacgccgcaatggaggacgggacctatgggtccgaagacgctttgtaacgcttgcggagtgaggtacaaatcagggaggctcgtgccggagtatagaccggcgtcgagtccgacgttcgtgatggcgaggcactcgaactctcaccggaaagtgatggagctccggcgacagaaggagatgagagacgagcatttgctgagtcagcttaggtgtgagaatctactgatggatatcagatccaacggtgaagatttcttaatgcataataatactaaccacgtggctcctgattttagacacttaatctagttttctatttccacgtggataatttcgcaa

SEQ ID NO: 541 - protein, 308 aa, Arabidopsis thaliana
MEKIAPELFLVAGNPDSFVVDDLLDFSNDDGEVDDGLNTLPDSSTLSTGTLTDSSNSSSLFTDGTGFSDLYIPNDDIAELEWLSNFVEESFAGEDQDKLHLFSGLKNPQTTGSTLTHLIKPEPELDHQFIDIDESNVAVPAKARSKRSRSAASTWASRLLSLADSDETNPKKKQRRVKEQDFAGDMDVDCGESGGGRRCLHCATEKTPQWRTGPMGPKTLCNACGVRYKSGRLVPEYRPASSPTFVMARHSNSHRKVMELRRQKEMRDEHLLSQLRCENLLMDIRSNGEDFLMHNNTNHVAPDFRHLI

SEQ ID NO: 542 - DNA, 1069 bp, Arabidopsis thaliana
aatcccaacccacacacctctcaaatcctcctctcctcgtttctctttctctcctcttcacagaaccaaaacatatcaaacctttttttctcttgggtttaagtaaaaatcgaatctttgtgtcggtttttagggttcttgaaacgatatgggtaagtctagtggtagaaatggtaacggaagctttaacggcaataaatttcacggagttagaccttacgtacggtctccagttccacggcttagatggacgccggatcttcaccgttgtttcgttcacgccgtcgagattctcggtggtcaacaccgagcaacaccaaaacttgttcttaagatgatggatgtgaagggacttaccatttcacatgtcaaaagccaccttcagatgtatagaggaggttcaaagctcactttggagaaaccagaagaaagctcatcatcttcaataagaagaagacaagacagtgaagaagattattatcttcatgacaacttgtctttacacacaaggaatgattgtcttttgggttttcactcttttcctctttcttcacattcttcatttagaggaggaggaggaggaagaacaaaagagcagcagacttcagagtctggtggttatgatgatgatgctgactttcttcacatcaagaagatgaacgatacgacgacgtttttgtcacatcatttccccaagggaacagaggagtggcgggaacaagaacacgaagaagaagaagaagatttgtcgttgtctctgtcgttaaatcatcatcattggagaagcaatggatcatcggtggtgagcgaaacgagtgaagcagcagtctcgacttgttcagcaccattcgtatccaaagattgctttggttcttcaaagattgatcttaatctgtcaatttctctcctcggtagctaaataagttatgcaagatttaggttcagagaaactattcggatgtgtttttgaaactaggatattgaatgttagtagagaaacctagaaaatgaagtttagataaattatcaacgcagcgttttgatcgcctttgaacggaaaattaacaaa

SEQ ID NO: 543 - protein, 256 aa, Arabidopsis thaliana
MGKSSGRNGNGSFNGNKFHGVRPYVRSPVPRLRWTPDLHRCFVHAVEILGGQHRATPKLVLKMMDVKGLTISHVKSHLQMYRGGSKLTLEKPEESSSSSIRRRQDSEEDYYLHDNLSLHTRNDCLLGFHSFPLSSHSSFRGGGGGRTKEQQTSESGGYDDDADFLHIKKMNDTTTFLSHHFPKGTEEWREQEHEEEEEDLSLSLSLNHHHWRSNGSSVVSETSEAAVSTCSAPFVSKDCFGSSKIDLNLSISLLGS

SEQ ID NO: 544 - DNA, 1424 bp, Arabidopsis thaliana
tcgacagagttgtgttgggcgtggaacttggactagttccacatatcaggttatatagatcttctctttcaacttctgattcgtccagaagctttcctaatctgagatctgacatggaacaccaaggttggagttttgaggagaattatagtttgtccactaatagaagatctatcaggccacaagatgaactagtggagttattatggcgagatggacaagtggttctgcagagccaaactcatagagaacaaacccaaacccagaaacaagatcatcatgaagaagccctaagatccagcacctttcttgaagatcaagaaactgtctcttggatccaataccctccagatgaagacccattcgaacccgacgacttctcctcccacttcttctcaaccatggatcccctccagagaccaacctcagagacggttaagcctaagtccagtcctgaacctcctcaagtcatggttaagcctaaggcctgtcctgaccctcctcctcaagtcatgcctcctccaaaatttaggttaacaaattcatcatcggggattagggaaacagaaatggaacagtactcggtaacgaccgttggacctagccattgcggaagcaacccatcacagaacgatctcgatgtctcaatgagtcatgatcgaagcaaaaacatagaagaaaagcttaatccgaacgcaagttcctcatcaggtggctcctctggttgcagctttggcaaagatatcaaagaaatggctagtggaagatgcatcacaaccgaccgtaagagaaaacgtataaatcacactgacgaatctgtatctctatcagatgcaatcggtaacaagtcgaaccaacgatcaggatcaaaccgaaggagtcgagcagctgaagttcataatctctccgaaaggaggaggagagataggatcaatgagagaatgaaggctttgcaagaactaatacctcactgcagtaaaactgataaagcttcgattttagacgaagccatagattatttgaaatcacttcagttacagcttcaagtgatgtggatggggagtggaatggcggcggcggcggcttcggctccgatgatgttccccggagttcaacctcagcagttcatacgtcagatacagagcccggtacagttacctcgatttccggttatggatcagtctgcaattcagaacaatcccggtttagtttgccaaaacccggtacaaaaccagatcatctccgaccggtttgctagatacatcggtgggttcccacacatgcaggccgcgactcagatgcagccgatggagatgttgagatttagttcaccggcgggacagcaaagtcaacaaccgtcgtctgtgccgacgaagaccaccgacggttctcgtttggaccactaggttggtgagccactttgc

SEQ ID NO: 545 - protein, 430 aa, Arabidopsis thaliana
MEHQGWSFEENYSLSTNRRSIRPQDELVELLWRDGQVVLQSQTHREQTQTQKQDHHEEALRSSTFLEDQETVSWIQYPPDEDPFEPDDFSSHFFSTMDPLQRPTSETVKPKSSPEPPQVMVKPKACPDPPPQVMPPPKFRLTNSSSGIRETEMEQYSVTTVGPSHCGSNPSQNDLDVSMSHDRSKNIEEKLNPNASSSSGGSSGCSFGKDIKEMASGRCITTDRKRKRINHTDESVSLSDAIGNKSNQRSGSNRRSRAAEVHNLSERRRRDRINERMKALQELIPHCSKTDKASILDEAIDYLKSLQLQLQVMWMGSGMAAAAASAPMMFPGVQPQQFIRQIQSPVQLPRFPVMDQSAIQNNPGLVCQNPVQNQIISDRFARYIGGFPHMQAATQMQPMEMLRFSSPAGQQSQQPSSVPTKTTDGSRLDH

SEQ ID NO: 546 - DNA, 902 bp, Arabidopsis thaliana
tcgactccttaattgcatcaccaacctaacccctcatcatatgatcacctttctttttttcctttaatatatatatatgctcacacacacacatatatatatacatataagcatcgcctcaagcattaaaatttttacgaaccaaacaaacaaaaattatgaataattataatatgaacccatctctcttccaaaattacacttggaacaacatcatcaacagcagcaacaacaacaacaagaatgatgatcatcatcatcaacataataatgatccaatcggtatggccatggaccagtacacacagctccatatcttcaatcctttctcttcttctcatttccctcctctctcttcttccctcacaaccaccactcttctctccggagatcaagaagacgacgaagacgaagaagaacctctagaggaactcggtgctatgaaggaaatgatgtacaagatcgcagccatgcaatcggttgacatcgacccagcaaccgtcaagaaacccaaacgccgtaacgtgaggatctccgacgaccctcagagtgtggcggctagacatcgccgtgagagaatcagtgagaggatcagaattcttcagagactcgtgccaggtggcactaaaatggatacggcttcaatgctcgatgaagctatacgctatgtcaagttcttgaaacggcagatccggctactcaataataataccggatatactcctccgccgccgcaagatcaagcttctcaggcggtgacgacgtcatgggtttcaccgccaccaccgccaagtttcggccgtgggggaagaggagtaggagaattaatctagacaagatgacatttccattagtagtaactaaattatgctataatgtgtgagtaatggtgcaattatgga

SEQ ID NO: 547 - protein, 224 aa, Arabidopsis thaliana
MNNYNMNPSLFQNYTWNNIINSSNNNNKNDDHHHQHNNDPIGMAMDQYTQLHIFNPFSSSHFPPLSSSLTTTTLLSGDQEDDEDEEEPLEELGAMKEMMYKIAAMQSVDIDPATVKKPKRRNVRISDDPQSVAARHRRERISERIRILQRLVPGGTKMDTASMLDEAIRYVKFLKRQIRLLNNNTGYTPPPPQDQASQAVTTSWVSPPPPPSFGRGGRGVGELI

SEQ ID NO: 548 - DNA, 1197 bp, Arabidopsis thaliana
atggattcaaattttcattactcgatagatcttaacgaagatcaaaaccatcacgaacaaccctttttctatcctcttggatcctcttcctcgcttcatcatcatcatcatcatcatcatcatcaagtcccttctaattcttcatcttcttcttcgtccatttcatcgctctcctcttacctccctttcttgatcaactctcaagaagatcaacatgttgcctacaacaacacttatcacgctgatcatctccatctttctcaacccctcaaggccaagatgtttgtggctaacggtggatcatcagcatgcgatcacatggtgccaaagaaggagacaagactgaaactaacgataaggaaaaaagatcacgaagaccaaccccatcctcttcatcaaaacccgacaaaacccgattcagactccgacaagtggttgatgtccccaaagatgcggttgatcaagaaaacaatcaccaacaataaacagctcattgatcagactaataataataatcataaagaaagtgatcactaccctttgaatcataagactaatttcgacgaggatcaccatgaagatcttaatttcaagaacgtcttgaccaggaagaccacggccgcgaccaccgagaatcgctacaatacaatcaacgagaacggttatagtaataacaatggcgtgattagggtttgttcggattgtaacaccaccaagactcctctttggcgaagtggacctcgaggtcccaagtctctttgtaacgcatgtggtatacggcaaagaaaggcaaggcgagccgctatggccgcggccgctgcagccggcgaccaagaggtggcggtagcgccccgagtgcaacaattaccgctgaaaaagaagttgcaaaataaaaaaaagagatcaaacggaggggaaaaatacaatcactctcctccaatggtggccaaggccaaaaagtgcaagatcaaagaggaagaggagaaggaaatggaagcggaaacggttgccggagattcagagatcagcaaatctacaacttcttctaattcttcgatttcgtcaaacaaattttgcttcgatgatttgacaataatgttgagcaaaagctcagcttatcaacaagtgttcccacaagatgagaaggaggctgctgttttgctcatggctctgtcgtatggaatggttcacggttga

SEQ ID NO: 549 - protein, 398 aa, Arabidopsis thaliana
MDSNFHYSIDLNEDQNHHEQPFFYPLGSSSSLHHHHHHHHHQVPSNSSSSSSSISSLSSYLPFLINSQEDQHVAYNNTYHADHLHLSQPLKAKMFVANGGSSACDHMVPKKETRLKLTIRKKDHEDQPHPLHQNPTKPDSDSDKWLMSPKMRLIKKTITNNKQLIDQTNNNNHKESDHYPLNHKTNFDEDHHEDLNFKNVLTRKTTAATTENRYNTINENGYSNNNGVIRVCSDCNTTKTPLWRSGPRGPKSLCNACGIRQRKARRAAMAAAAAAGDQEVAVAPRVQQLPLKKKLQNKKKRSNGGEKYNHSPPMVAKAKKCKIKEEEEKEMEAETVAGDSEISKSTTSSNSSISSNKFCFDDLTIMLSKSSAYQQVFPQDEKEAAVLLMALSYGMVHG

SEQ ID NO: 550 - DNA, 666 bp, Arabidopsis thaliana
atgtgtgagtcaagcaacaaagtcagagtatcgccatacccgcttcggtcttcgaggaccgacaaacacaaggcgtcagagtcgcctattgagacaggttgggaggatgtgcgtggatgtcatccttacatgtgcgatacgagtgttcgtcactccaattgtttcaagcagttccgcagaaaaaccataaaaaagcgcctataccccaagaccttacattgtcctctctgtagaggtgaagtatccgagacgacaaaggtgacgagcactgcaagaagatttatgaatgctaaaccgaggtcttgctccgtagaggattgcaaattctctgggacgttttctcagcttactaagcacttgaaaactgagcatcgcggtattgtgccaccaaaggtcgatccactgagacaacagagatgggaaatgatggagagacattctgaatacgttgaactcatgactgcagctgggatttcgcgtatggctgaggtgatgcaacaacagcttccccaggatcagaatcatcctcatgtgtttcaagtgaccgttaatggaaccatatggaatctaattgatccgagtcagggaaggaatggattaggcatcaccaactatagcgcaatgcagtttgtaccattaagcataaatcacagtagaactctgtga

SEQ ID NO: 551 - protein, 221 aa, Arabidopsis thaliana
MCESSNKVRVSPYPLRSSRTDKHKASESPIETGWEDVRGCHPYMCDTSVRHSNCFKQFRRKTIKKRLYPKTLHCPLCRGEVSETTKVTSTARRFMNAKPRSCSVEDCKFSGTFSQLTKHLKTEHRGIVPPKVDPLRQQRWEMMERHSEYVELMTAAGISRMAEVMQQQLPQDQNHPHVFQVTVNGTIWNLIDPSQGRNGLGITNYSAMQFVPLSINHSRTL

SEQ ID NO: 552 - DNA, 783 bp, Arabidopsis thaliana
atggaaaacgaagtaaacgcaggaacagcaagcagttcaagatggaacccaacgaaagatcagatcacgctactggaaaatctttacaaggaaggaatacgaactccgagcgccgatcagattcagcagatcaccggtaggcttcgtgcgtacggccatatcgaaggtaaaaacgtcttttactggttccagaaccataaggctaggcaacgccaaaagcagaaacaggagcgcatggcttacttcaatcgcctcctccacaaaacctcccgtttcttctacccccctccttgctcaaacgtgggttgtgtcagtccgtactatttacagcaagcaagtgatcatcatatgaatcaacatggaagtgtatacacaaacgatcttcttcacagaaacaatgtgatgattccaagtggtggctacgagaaacggacagtcacacaacatcagaaacaactttcagacataagaacaacagcagccacaagaatgccaatttctccgagttcactcagatttgacagatttgccctccgtgataactgttatgccggtgaggacattaacgtcaattccagtggacggaaaacactccctctttttcctcttcagcctttgaatgcaagtaatgctgatggtatgggaagttccagttttgcccttggtagtgattctccggtggattgttctagcgatggagccggccgagagcagccgtttattgatttcttttctggtggttctacttctactcgtttcgatagtaatggtaatgggttgtaa

SEQ ID NO: 553 - protein, 260 aa, Arabidopsis thaliana
MENEVNAGTASSSRWNPTKDQITLLENLYKEGIRTPSADQIQQITGRLRAYGHIEGKNVFYWFQNHKARQRQKQKQERMAYFNRLLHKTSRFFYPPPCSNVGCVSPYYLQQASDHHMNQHGSVYTNDLLHRNNVMIPSGGYEKRTVTQHQKQLSDIRTTAATRMPISPSSLRFDRFALRDNCYAGEDINVNSSGRKTLPLFPLQPLNASNADGMGSSSFALGSDSPVDCSSDGAGREQPFIDFFSGGSTSTRFDSNGNGL

SEQ ID NO: 554 - DNA, 1291 bp, Arabidopsis thaliana
tttttctccaaacccataagccaaaatagccaaaactactttctaccatttgtctattactccttcaaccatatcattcacatctcctcagtttcgataaaacaaacaaagccctaatatttttacttgctatatcgctgtctctctcccttctcctctataaacatacatataaattaagtacacaccaaaatgtggacgatgggttacaacgaaggaggcgcagattccttcaacggaggaagaaagcttcgtcctctcatcccacgtctcacttcttgccccaccgccgccgtaaacaccaactccgaccaccgctttaatatggcagtggtgacgatgacggcggagcagaacaagagggagctgatgatgctaaactcagaacctcaacatccaccggtaatggtgagctcacggtggaatccgacaccagatcagttaagggttcttgaagagctttaccgacaaggaactagaactccttctgccgaccacatccaacaaatcaccgcacagctacgacggtacgggaagatagaaggcaaaaacgttttctattggttccaaaaccacaaagcccgagaacgccagaaacgacggcgacaaatggaaactggccacgaagaaacggtcctttcaacagcaagtcttgtctcaaaccacggattcgacaagaaagatcctccaggttacaaggttgaacaggtcaagaactggatatgttcggtcggatgcgacacgcaaccagagaaaccttcccgtgattatcatctggaggagccagcgaatatacgggtggagcacaatgctcgttgtggaggagacgagagacgaagctttttagggataaacaccacgtggcagatgatgcagttgccacctagtttctactcttcttcacatcatcatcatcaacgtaacctcattctcaattcacctactgtttcctccaacatgtccaacagcaacaatgctgtctctgcttctaaagatacggtcacggtttcacctgtatttctacgtacgagagaagcaacgaacacagagacttgtcatcgaaatggtgatgataataaagatcaagaacaacatgaagattgctccaacggtgaattggatcatcaagaacagacacttgagctgtttccactgagaaaagaagggttttgtagcgatggtgagaaagacaagaacattagtggcattcactgtttctatgagtttctgccattgaagaactaaacctaattgaagtctttcaagaaaaaaaaaaaaaaaaaaaaaaaaa

SEQ ID NO: 555 - protein, 350 aa, Arabidopsis thaliana
MWTMGYNEGGADSFNGGRKLRPLIPRLTSCPTAAVNTNSDHRFNMAVVTMTAEQNKRELMMLNSEPQHPPVMVSSRWNPTPDQLRVLEELYRQGTRTPSADHIQQITAQLRRYGKIEGKNVFYWFQNHKARERQKRRRQMETGHEETVLSTASLVSNHGFDKKDPPGYKVEQVKNWICSVGCDTQPEKPSRDYHLEEPANIRVEHNARCGGDERRSFLGINTTWQMMQLPPSFYSSSHHHHQRNLILNSPTVSSNMSNSNNAVSASKDTVTVSPVFLRTREATNTETCHRNGDDNKDQEQHEDCSNGELDHQEQTLELFPLRKEGFCSDGEKDKNISGIHCFYEFLPLKN

SEQ ID NO: 556 - DNA, 1227 bp, Arabidopsis thaliana
atctctttactaccagcaagttgttttcttgctaacttcaaacttctctttctcttgttcctctctaagtcttgatcttatttaccgttaactttgtgaacaaaagtcgaatcaaacacacatggagccgccacagcatcagcatcatcatcatcaagccgaccaagaaagcggcaacaacaacaacaagtccggctctggtggttacacgtgtcgccagaccagcacgaggtggacaccgacgacggagcaaatcaaaatcctcaaagaactttactacaacaatgcaatccggtcaccaacagccgatcagatccagaagatcactgcaaggctgagacagttcggaaagattgagggcaagaacgtcttttactggttccagaaccataaggctcgtgagcgtcagaagaagagattcaacggaacaaacatgaccacaccatcttcatcacccaactcggttatgatggcggctaacgatcattatcatcctctacttcaccatcatcacggtgttcccatgcagagacctgctaattccgtcaacgttaaacttaaccaagaccatcatctctatcatcataacaagccatatcccagcttcaataacgggaatttaaatcatgcaagctcaggtactgaatgtggtgttgttaatgcttctaatggctacatgagtagccatgtctatggatctatggaacaagactgttctatgaattacaacaacgtaggtggaggatgggcaaacatggatcatcattactcatctgcaccttacaacttcttcgatagagcaaagcctctgtttggtctagaaggtcatcaagacgaagaagaatgtggtggcgatgcttatctggaacatcgacgtacgcttcctctcttccctatgcacggtgaagatcacatcaacggtggtagtggtgccatctggaagtatggccaatcggaagttcgcccttgcgcttctcttgagctacgtctgaactagctcttacgccggtgtcgctcgggattaaagctctttcctctctctctctctttcgtactcgtatgttcacaactatgcttcgctagtgattaatgatgcagttgttatattagtagttaactagttatctctcgttatgtgtaatttgtaattactagctaagtatcgtctaggtttaattgtaattgacaaccgtttatctctatgatgaataagttaaatttatatat

SEQ ID NO: 557 - protein, 291 aa, Arabidopsis thaliana
MEPPQHQHHHHQADQESGNNNNKSGSGGYTCRQTSTRWTPTTEQIKILKELYYNNAIRSPTADQIQKITARLRQFGKIEGKNVFYWFQNHKARERQKKRFNGTNMTTPSSSPNSVMMAANDHYHPLLHHHHGVPMQRPANSVNVKLNQDHHLYHHNKPYPSFNNGNLNHASSGTECGVVNASNGYMSSHVYGSMEQDCSMNYNNVGGGWANMDHHYSSAPYNFFDRAKPLFGLEGHQDEEECGGDAYLEHRRTLPLFPMHGEDHINGGSGAIWKYGQSEVRPCASLELRLN

SEQ ID NO: 558 - DNA, 828 bp, Arabidopsis thaliana
atgataaaactactatttacgtacatatgcacatacacatataaactatatgctctatatcatatggattacgcatgcgtgtgtatgtataaatataaaggcatcgtcacgcttcaagtttgtctcttttatattaaactgagagttttcctctcaaactttaccttttcttcttcgatcctagctcttaagaaccctaataattcattgatcaaaataatggcgattttgccggaaaactcttcaaacttggatcttactatctccgttccaggcttctcttcatcccctctctccgatgaaggaagtggcggaggaagagaccagctaaggctagacatgaatcggttaccgtcgtctgaagacggagacgatgaagaattcagtcacgatgatggctctgctcctccgcgaaagaaactccgtctaaccagagaacagtcacgtcttcttgaagatagtttcagacagaatcatacccttaatcccaaacaaaaggaagtacttgccaagcatttgatgctacggccaagacaaattgaagtttggtttcaaaaccgtagagcaaggagcaaattgaagcaaaccgagatggaatgcgagtatctcaaaaggtggtttggttcattaacggaagaaaaccacaggctccatagagaagtagaagagcttagagccataaaggttggcccaacaacggtgaactctgcctcgagccttactatgtgtcctcgctgcgagcgagttacccctgccgcgagcccttcgagggcggtggtgccggttccggctaagaaaacgtttccgccgcaagagcgtgatcgttga

SEQ ID NO: 559 - protein, 275 aa, Arabidopsis thaliana
MIKLLFTYICTYTYKLYALYHMDYACVCMYKYKGIVTLQVCLFYIKLRVFLSNFTFSSSILALKNPNNSLIKIMAILPENSSNLDLTISVPGFSSSPLSDEGSGGGRDQLRLDMNRLPSSEDGDDEEFSHDDGSAPPRKKLRLTREQSRLLEDSFRQNHTLNPKQKEVLAKHLMLRPRQIEVWFQNRRARSKLKQTEMECEYLKRWFGSLTEENHRLHREVEELRAIKVGPTTVNSASSLTMCPRCERVTPAASPSRAVVPVPAKKTFPPQERDR

SEQ ID NO: 560 - DNA, 2178 bp, Arabidopsis thaliana
atgtctcagtcaaacatggtaccagtggctaacaacggagacaacaacaacgacaacgaaaacaacaacaacaacaacaacaatggtggaactgacaacactaatgctggaaatgattctggagatcaagatttcgacagtgggaatacctcaagtggcaatcatggagaagggttgggaaacaatcaagctcctcgtcataagaagaaaaaatacaatcgtcacacccaacttcagatttcggagatggaagctttcttcagagagtgtcctcacccagatgacaaacaaaggtacgaccttagcgctcaattgggattggaccctgttcagatcaaattctggttccagaacaaacgcactcaaaacaagaatcaacaagaacgctttgagaactcagaacttcggaatctgaacaaccaccttaggtctgaaaatcagcggttacgagaagctattcatcaagccttatgccctaagtgtggaggccaaactgcaattggcgaaatgaccttcgaagagcaccatcttcgcatcctcaacgctcgtttgactgaagagatcaagcaactttccgtgacagcggaaaagatatcaaggcttacggggataccagtaaggagccatccccgtgtgtctcctcctaatcctcctccaaatttcgagttcgggatgggatctaagggaaatgtcggaaaccactcgagggaaaccactggacctgcagatgctaataccaagccgatcatcatggagttggcatttggagccatggaggagctcttggtgatggctcaagtggctgaaccactgtggatgggaggatttaatggcactagcttagctttgaacttggatgaatacgaaaagacgtttcgcacgggtctcggtcctagacttggcgggtttcgaaccgaggcatccagggaaactgcactcgtggcaatgtgtcctactggcattgttgaaatgctcatgcaagagaatctgtggtcaacaatgtttgccggaattgttggtagagccaggactcatgaacagataatggctgatgctgctggaaacttcaatggaaatctccaaataatgagtgctgagtaccaagtgctttccccgctagtcacaacccgcgaaagctacttcgtccgctactgtaagcaacaaggagagggtttgtgggcggtggtcgatatttccatcgaccatctcctcccaaacatcaacctaaaatgtcgccgccgaccctctggatgtctgattcaagaaatgcatagtggttactccaaggttacatgggtggaacatgtggaagtagatgatgcaggaagttacagcatctttgagaaattaatctgtactggtcaagcttttgctgctaaccgctgggttggtacattggtacgccagtgtgagcggatatctagcatcttgtcgacagattttcaatctgtcgattccggtgatcacataacgctaactaaccatggaaagatgagcatgctgaagatagctgagcggattgcgagaaccttctttgctggaatgaccaatgcgacggggtctacaatattttctggtgttgaaggagaagatatcagagtgatgacaatgaagagcgtgaatgatccaggaaagcctcccggtgtcattatttgtgcagccacttccttttggcttcctgctcctcctaacactgtctttgacttcctcagagaggctactcaccgacacaattgggatgttctctgcaacggagagatgatgcacaagatagcagagattacgaatgggatagacaaaaggaactgtgcaagtttactccggcatggacacactagcaagagcaagatgatgatagttcaagagacttctactgacccaacagcttcatttgtgctttatgcgcctgttgatatgacatcaatggatattactctccatggaggtggtgatcctgactttgtggtgatcctgccttctggttttgctatttttccagatggtacgggtaagcctggaggaaaagaaggaggatcacttttgaccatttccttccaaatgctggttgagtcaggtcctgaggctaggctgagtgttagctctgttgcaactactgagaatctgattcgtacaaccgtgcggaggatcaaagatttgtttccttgtcagactgcttga

SEQ ID NO: 561 - protein, 725 aa, Arabidopsis thaliana
MSQSNMVPVANNGDNNNDNENNNNNNNNGGTDNTNAGNDSGDQDFDSGNTSSGNHGEGLGNNQAPRHKKKKYNRHTQLQISEMEAFFRECPHPDDKQRYDLSAQLGLDPVQIKFWFQNKRTQNKNQQERFENSELRNLNNHLRSENQRLREAIHQALCPKCGGQTAIGEMTFEEHHLRILNARLTEEIKQLSVTAEKISRLTGIPVRSHPRVSPPNPPPNFEFGMGSKGNVGNHSRETTGPADANTKPIIMELAFGAMEELLVMAQVAEPLWMGGFNGTSLALNLDEYEKTFRTGLGPRLGGFRTEASRETALVAMCPTGIVEMLMQENLWSTMFAGIVGRARTHEQIMADAAGNFNGNLQIMSAEYQVLSPLVTTRESYFVRYCKQQGEGLWAVVDISIDHLLPNINLKCRRRPSGCLIQEMHSGYSKVTWVEHVEVDDAGSYSIFEKLICTGQAFAANRWVGTLVRQCERISSILSTDFQSVDSGDHITLTNHGKMSMLKIAERIARTFFAGMTNATGSTIFSGVEGEDIRVMTMKSVNDPGKPPGVIICAATSFWLPAPPNTVFDFLREATHRHNWDVLCNGEMMHKIAEITNGIDKRNCASLLRHGHTSKSKMMIVQETSTDPTASFVLYAPVDMTSMDITLHGGGDPDFVVILPSGFAIFPDGTGKPGGKEGGSLLTISFQMLVESGPEARLSVSSVATTENLIRTTVRRIKDLFPCQTA

SEQ ID NO: 562 - DNA, 766 bp, Arabidopsis thaliana
catcaccaatcttttgaatctaagagagagaagaagaagaaggtctagagaacgaaaagaagaaacatgaataaccagaatgtagatgatcataatcttctactcatttctcaattgtaccctaatgtctatactccattagtaccacaacaaggaggagaagcaaaaccaacacggcggaggaaaaggaagagcaagagtgttgtggtggcagaggagggtgaaaacgaaggcaatgggtggtttagaaagagaaaattgagtgatgagcaagtaagaatgttggagattagctttgaagacgatcataagcttgaatccgagaggaaagatcggcttgcttctgagttagggcttgatcctcgtcaagtcgccgtctggttccaaaaccgccgtgcacggtggaagaacaaacgagtcgaggatgaatacactaaactcaagaatgcatacgaaaccaccgtcgttgagaaatgtcgtcttgattctgaggttattcacctaaaggaacaactttacgaggctgaaagagagatccaacggcttgcaaaaagagttgaaggaactttaagtaacagtcctatctcatcctctgtgaccattgaagccaatcatacgacaccgttttttggagattacgacatcggatttgacggtgaggctgacgagaacttgctctactcgccagattacattgatggattagactggatgagccaatttatgtaaaaaactataagctaatctattttcagtcgtagtatag

SEQ ID NO: 563 - protein, 220 aa, Arabidopsis thaliana
MNNQNVDDHNLLLISQLYPNVYTPLVPQQGGEAKPTRRRKRKSKSVVVAEEGENEGNGWFRKRKLSDEQVRMLEISFEDDHKLESERKDRLASELGLDPRQVAVWFQNRRARWKNKRVEDEYTKLKNAYETTVVEKCRLDSEVIHLKEQLYEAEREIQRLAKRVEGTLSNSPISSSVTIEANHTTPFFGDYDIGFDGEADENLLYSPDYIDGLDWMSQFM

SEQ ID NO: 564 - DNA, 774 bp, Arabidopsis thaliana
caaaagaggtaaaaaaaaagaagaagagaagatggaatattggagcagctccttcatcgatggcgcgtcttcttccagcttcatctctcctttctataactttgaccatttttcaggaaaccaagacaacagatgtttaggtacaatgatgggtgcacaacaagatatacttcatgttcctctagcaatggtagagagtggctatggagaagaaagcaacagttttaatggacaggagaagaaaaaaaagaagatgacgagcgagcagctaaagttcctcgagagaagtttccaagaagagataaagctgaatccggacaggaagatgaagctgaatccggacaggaagatgaagctgtccaaagaactggggctgcagccgagacagattgcggtttggttccagaacaggaaagccaggtggaagaacaaacaacttgagcatctctatgaatcactaagacaagagtttgatattgtctctagagaaaaggaattgctacaagaagagctaatacaactgaaatcaatgataagagaggatagttcatgcaagaagaaacaaacctgggaaaaagcctgcagctgaggcaatagtatataagttccacttcagttatatctccaaaatggctcaaatttgtagctttagtcccaaacaagcaacaatttctatggctgattctgttttcctttgtattaagtattgtttaagtgattttcgtgtaaagggttctttactaagttgaagttaatgaagaaacatcgtgattc

SEQ ID NO: 565 - protein, 185 aa, Arabidopsis thaliana
MEYWSSSFIDGASSSSFISPFYNFDHFSGNQDNRCLGTMMGAQQDILHVPLAMVESGYGEESNSFNGQEKKKKKMTSEQLKFLERSFQEEIKLNPDRKMKLNPDRKMKLSKELGLQPRQIAVWFQNRKARWKNKQLEHLYESLRQEFDIVSREKELLQEELIQLKSMIREDSSCKKKQTWEKACS

SEQ ID NO: 566 - DNA, 703 bp, Arabidopsis thaliana
aacctaaaaattttacgagagataaaaaaaatgcaagatccgatggttagatcttacattaggtcagacaatccgcgaatgcactggaccgacgatcttgatatccgttttattcaagttattgaaaaactcggtggcgaagagagtgcaactcctaagagaattttgagtcttatgggtgtgagagacctcacaatatcacatgtcaaaagtcatctccagatgtataggaacaaaaagaaagaagaatctagtaaagaaataaaaatgatgcgggagatgacacagaggcaatctcagcaatatcttcaaatctatgaacgtgctacccaatttatccaaaatcaacaaaggctacaactggataatactgagaagataaccccagttttgggatcaagtaacaagtctctagatcaatcttcaaaggttggactaaatgaaaacagaggcaatgatgttgttgttgttggtggtgcaactggtgaagaagaattgtcccttgaactcactcttggtcgcaagtactaagaggagtttggtttctatctttttttttatgcttgctctctattttatgtaatgcttatctcatatatataatgggataagaaaaataaaaactgaacaatattttatggtattctatttataatgctattatgtgattttgcatccatgctatttgggggaaatattattt

SEQ ID NO: 567 - protein, 166 aa, Arabidopsis thaliana
MQDPMVRSYIRSDNPRMHWTDDLDIRFIQVIEKLGGEESATPKRILSLMGVRDLTISHVKSHLQMYRNKKKEESSKEIKMMREMTQRQSQQYLQIYERATQFIQNQQRLQLDNTEKITPVLGSSNKSLDQSSKVGLNENRGNDVVVVGGATGEEELSLELTLGRKY

SEQ ID NO: 568 - DNA, 844 bp, Arabidopsis thaliana
ccctttgagtttttttttggggtgaaactcatctctttgagttccttcaaccattttgaaaacagcttgccggaaacattggtgaattttcatcgaatcgcgagtttcagtaagatataaaacagatgaagaacccaatcgttagatcttatgttagatcaaaagtgccgcggttgcggtggaactctgatcttcataactcttttgttcaagctgttgaacaactaggtggagaaaatagagcaactcctaaaatggttttacagttaatggatgtgagaggactcacaatatcacatgtgaagagtcatctccagatgtataggggcatgaagcttgaagaatccatgcaagaagagatattagcaaagagaagtgttagagtgacaggacaagtaacttggtggcaatttcaacattaccttcataactaccaacgtcttcagggcaatgccaactttttccaaaatcaacaaaggcaagaagcgggaatatatgaaaaaattataacatttggacaatcaagtaatgaaactaaggaagtaccaagtgactactttacctgcaagtctctctatgaaacatccagagctccacaaaataaaacgagagatgatgatgaaaatggtgaagctgttgttgctattgaagatgatggtaatgttgttgatgaacatgatgatgaggatgctaatgatgatgaggttactttgtcactaaactcaataaaagtttcaaaaagtgaagaagaattgtcccttgagctcactcttggtctcaaagcataacatgttttgattttgatttttttttttttgtagaaaccgttggaagtatgttgtag

SEQ ID NO: 569 - protein, 220 aa, Arabidopsis thaliana
MKNPIVRSYVRSKVPRLRWNSDLHNSFVQAVEQLGGENRATPKMVLQLMDVRGLTISHVKSHLQMYRGMKLEESMQEEILAKRSVRVTGQVTWWQFQHYLHNYQRLQGNANFFQNQQRQEAGIYEKIITFGQSSNETKEVPSDYFTCKSLYETSRAPQNKTRDDDENGEAVVAIEDDGNVVDEHDDEDANDDEVTLSLNSIKVSKSEEELSLELTLGLKA

SEQ ID NO: 570 - DNA, 1440 bp, Arabidopsis thaliana
atcctttcaatttccactcctctctaatataattcacattttcccactattgctgattcatttttttttgtgaattatttcaaacccacataaaaaaatctttgtttaaatttaaaaccatggatccttcatttaggttcattaaagaggagtttcctgctggattcagtgattctccatcaccaccatcttcttcttcatacctttattcatcttccatggctgaagcagccataaatgatccaacaacattgagctatccacaaccattagaaggtctccatgaatcagggccacctccatttttgacaaagacatatgacttggtggaagattcaagaaccaatcatgtcgtgtcttggagcaaatccaataacagcttcattgtctgggatccacaggccttttctgtaactctccttcccagattcttcaagcacaataacttctccagttttgtccgccagctcaacacatatggtttcagaaaggtgaatccggatcggtgggagtttgcaaacgaagggtttcttagagggcaaaagcatctcctcaagaacataaggagaagaaaaacaagtaataatagtaatcaaatgcaacaacctcaaagttctgaacaacaatctctagacaatttttgcatagaagtgggtaggtacggtctagatggagagatggacagcctaaggcgagacaagcaagtgttgatgatggagctagtgagactaagacagcaacaacaaagcaccaaaatgtatctcacattgattgaagagaagctcaagaagaccgagtcaaaacaaaaacaaatgatgagcttccttgcccgcgcaatgcagaatccagattttattcagcagctagtagagcagaaggaaaagaggaaagagatcgaagaggcgatcagcaagaagagacaaagaccgatcgatcaaggaaaaagaaatgtggaagattatggtgatgaaagtggttatgggaatgatgttgcagcctcatcctcagcattgattggtatgagtcaggaatatacatatggaaacatgtctgaattcgagatgtcggagttggacaaacttgctatgcacattcaaggacttggagataattccagtgctagggaagaagtcttgaatgtggaaaaaggaaatgatgaggaagaagtagaagatcaacaacaagggtaccataaggagaacaatgagatttatggtgaaggtttttgggaagatttgttaaatgaaggtcaaaattttgattttgaaggagatcaagaaaatgttgatgtgttaattcagcaacttggttatttgggttctagttcacacactaattaagaagaaattgaaatgatgactactttaagcatttgaatcaacttgtttcctattagtaatttggctttgtttcaatcaagtgagtcgtggactaacttgc

SEQ ID NO: 571 - protein, 406 aa, Arabidopsis thaliana
MDPSFRFIKEEFPAGFSDSPSPPSSSSYLYSSSMAEAAINDPTTLSYPQPLEGLHESGPPPFLTKTYDLVEDSRTNHVVSWSKSNNSFIVWDPQAFSVTLLPRFFKHNNFSSFVRQLNTYGFRKVNPDRWEFANEGFLRGQKHLLKNIRRRKTSNNSNQMQQPQSSEQQSLDNFCIEVGRYGLDGEMDSLRRDKQVLMMELVRLRQQQQSTKMYLTLIEEKLKKTESKQKQMMSFLARAMQNPDFIQQLVEQKEKRKEIEEAISKKRQRPIDQGKRNVEDYGDESGYGNDVAASSSALIGMSQEYTYGNMSEFEMSELDKLAMHIQGLGDNSSAREEVLNVEKGNDEEEVEDQQQGYHKENNEIYGEGFWEDLLNEGQNFDFEGDQENVDVLIQQLGYLGSSSHTN

SEQ ID NO: 572 - DNA, 1502 bp, Arabidopsis thaliana
attcacatttttatttatctttccatttagccattctgttccctgtctcttcctcctctctttttgacacatcacatcatcatcacatcatcattcaacatcaatcatcatcatatgcatacacatacatctgtgttctgcggatcgagttaattagttatggcttcttcgaatagacactggccaagcatgttcaagtccaaacctcatccccatcaatggcaacatgacatcaactctcctctcttgccttctgcttctcaccgatcttctcctttctcttcaggatgtgaagtggagaggagtccagagccaaaaccaagatggaatccaaagccagagcagattcggatacttgaagcaatctttaactccgggatggtgaatcctccaagagaggagatcaggcttcaagaatacggccaagtcggtgatgctaacgtcttctactggttccaaaaccgtaagtcccgtagtaaacacaaactccgcctcctccacaaccactccaaacactctctccctcaaacgcaaccgcagccgcagccgcaaccttcggcttcctcttcctcttcctcctcctcttcctcctccaaatccaccaaaccccgaaaaagcaagaacaagaacaacactaatctctctttgggtggtagtcaaatgatggggatgtttccaccggaaccggcgtttctcttcccggtctccactgtcggagggtttgaaggtatcaccgtctcatcccaattagggtttctctccggtgatatgattgagcaacaaaaaccggctccaacgtgtaccggactcctgctgagtgagatcatgaacggtagtgtgagttatggaactcatcatcaacaacacttgagtgagaaagaagttgaagaaatgaggatgaagatgttgcaacagccacagactcagatttgttacgctaccactaatcatcaaatagcttcttacaacaacaacaacaacaacaataacatcatgcttcatattcctcccactacttctactgccaccactattactacttcgcattctctcgctactgtcccatcaacttcggaccagcttcaagttcaagcggacgcacgaataagagttttcatcaatgaaatggagcttgaagtgagctcaggaccgttcaatgtgagggatgcatttggggaagaggttgttctgattaattccgcgggtcagcccattgtcaccgatgaatatggcgtcgctcttcaccctcttcaacacggagcctcgtactatctgatctagtcgtgtgggagatttgagtttgaagaagaaattaagacctgtctctttctttcaccatctctcgtacgtaggcttaaatgttaagattttataaagtattggtttcagttacctgttgtgacggtgtttatgtatgagtttcggacaacattcacaaaactctctcgttaaattgttgaccaataatatatgatgtgtgtttcattattatctaaaaaaaa

SEQ ID NO: 573 - protein, 373 aa, Arabidopsis thaliana
MASSNRHWPSMFKSKPHPHQWQHDINSPLLPSASHRSSPFSSGCEVERSPEPKPRWNPKPEQIRILEAIFNSGMVNPPREEIRLQEYGQVGDANVFYWFQNRKSRSKHKLRLLHNHSKHSLPQTQPQPQPQPSASSSSSSSSSSSKSTKPRKSKNKNNTNLSLGGSQMMGMFPPEPAFLFPVSTVGGFEGITVSSQLGFLSGDMIEQQKPAPTCTGLLLSEIMNGSVSYGTHHQQHLSEKEVEEMRMKMLQQPQTQICYATTNHQIASYNNNNNNNNIMLHIPPTTSTATTITTSHSLATVPSTSDQLQVQADARIRVFINEMELEVSSGPFNVRDAFGEEVVLINSAGQPIVTDEYGVALHPLQHGASYYLI

SEQ ID NO: 574 - DNA, 1238 bp, Arabidopsis thaliana
ttagatttgctattctctcattaccctatcaaccctaagtaatctctttagctctcgattatcatcattacaccatcatcatgtcctcctcaaacaaaaattggccaagcatgttcaaatccaaaccttgcaacaataatcatcatcatcaacatgaaatcgatactccatcttacatgcactactctaattgcaacctatcatcttccttttcctcagatcggataccagatcctaaaccgagatggaatcctaaaccggagcagattaggatactcgaatcaatcttcaattccggtactattaacccacctagagaggagattcaaagaatccggatccggcttcaagaatatggtcaaatcggtgacgcaaacgtgttttactggtttcaaaaccggaaatctcgagcaaaacacaagcttcgtgttcatcacaaaagccctaaaatgtcaaagaaggacaagacggttattcctagtactgacgctgatcattgttttggttttgttaaccaagaaaccggattatatccggttcaaaacaatgagttggtggtaaccgaaccggccggttttctatttccggttcataatgatccgagcgctgctcaatcagcgtttggttttggcgattttgttgtaccggtggtaacggaagaagggatggcattctctaccgttaataacggcgttaatttggagactaacgaaaattttgataaaattccggcgatcaatttatacggcggagatggaaatggcggtggaaattgttttcctcctttgactgttccattaaccatcaatcaatctcaagaaaaacgagatgtaggattatccggtggtgaagacgtcggagataatgtttatccggtgagaatgacggtgtttattaacgagatgcctatcgaagtagtgtctggattattcaacgttaaggcagctttcggaaacgatgccgttttgatcaactcgtttggccagcctattcttacagatgaatttggtgttacttatcaacctctccaaaatggcgcaatctattatcttatttagaagatattgaaaagcaaatgttatggtgctatggataaatattaatataataataaaagatttctgcgatttatttagttattaattatataagaatttcatttcttatcttttaaatttatgaaccaatttccgggcaatttcctttttcgagaactttggaaaaattaaggaatggaa

SEQ ID NO: 575 - protein, 325 aa, Arabidopsis thaliana
MSSSNKNWPSMFKSKPCNNNHHHQHEIDTPSYMHYSNCNLSSSFSSDRIPDPKPRWNPKPEQIRILESIFNSGTINPPREEIQRIRIRLQEYGQIGDANVFYWFQNRKSRAKHKLRVHHKSPKMSKKDKTVIPSTDADHCFGFVNQETGLYPVQNNELVVTEPAGFLFPVHNDPSAAQSAFGFGDFVVPVVTEEGMAFSTVNNGVNLETNENFDKIPAINLYGGDGNGGGNCFPPLTVPLTINQSQEKRDVGLSGGEDVGDNVYPVRMTVFINEMPIEVVSGLFNVKAAFGNDAVLINSFGQPILTDEFGVTYQPLQNGAIYYLI

SEQ ID NO: 576 - DNA, 816 bp, Arabidopsis thaliana
atgggctacatctccaacaacaacctcatcaactatttgcccctctctactactcaacctcctcttcttctcacccactgtgatattaacggcaatgatcaccatcagctcataaccgcatcatcaggagaacacgatattgatgaacggaaaaacaacattcctgcggcggcgactttgagatggaatccgacgccagagcagatcacgacgctagaagagctttacagaagcggaacacggacgccgacgacggaacagatccaacagatagcatctaagcttcgtaaatatgggagaatcgaagggaagaacgttttctattggtttcagaatcataaggctagagagagactaaaacgccgccgtcgtgaaggtggtgctattatcaaaccacataaagacgtcaaggattcatcatcaggtggtcatcgagttgatcagacaaagctctgcccatcttttccacacacaaaccgaccacagccacagcatgaattagatcctgcgagttacaataaagacaacaatgctaataatgaagatcatgggacgactgaagaatctgatcagagggcatcagaggttggtaaatacgccacatggagaaatcttgttacttggtcgataactcaacaaccggaagagattaatatcgacgaaaatgtcaacggagaagaagaagaaacgagggacaaccggactttaaatctctttccggttagggagtaccaagagaaaacaggccggttgatagagaagacgaaagcatgcaactactgttactactacgagttcatgcctctgaagaactga

SEQ ID NO: 577 - protein, 271 aa, Arabidopsis thaliana
MGYISNNNLINYLPLSTTQPPLLLTHCDINGNDHHQLITASSGEHDIDERKNNIPAAATLRWNPTPEQITTLEELYRSGTRTPTTEQIQQIASKLRKYGRIEGKNVFYWFQNHKARERLKRRRREGGAIIKPHKDVKDSSSGGHRVDQTKLCPSFPHTNRPQPQHELDPASYNKDNNANNEDHGTTEESDQRASEVGKYATWRNLVTWSITQQPEEINIDENVNGEEEETRDNRTLNLFPVREYQEKTGRLIEKTKACNYCYYYEFMPLKN

SEQ ID NO: 578 - DNA, 2232 bp, Arabidopsis thaliana
atgtaccatccaaacatgtttgagagccatcatatgttcgatatgaccccaaagagtacctctgataacgacttgggaatcaccggtagccgagaagatgactttgagaccaagtcaggtaccgaagtcactactgagaatccttctggtgaagagcttcaagatcctagccaacgtcccaacaaaaagaagcgttaccatcgccacacgcaacgccaaattcaagagctcgaatcattctttaaggaatgtcctcatccagatgataagcaacgaaaagagttgagccgtgatctcaatttagagcctcttcaagttaagttttggttccaaaacaaacgcacacagatgaaggcacaaagtgagaggcatgagaaccagattctaaagtcagacaatgacaagctcagagcagagaacaatagatacaaagaagctctaagcaatgctacatgccctaactgtggcggtccagctgctattggagaaatgtcttttgacgaacaacatctcaggatcgaaaatgctcggctccgcgaagagattgataggatctctgctattgctgcgaaatacgttgggaagccgttaggatcgtctttcgctccactagcgatccacgcgccttctcgttcgcttgatcttgaagttggaaactttgggaaccagacaggctttgtaggagaaatgtatggaacaggggacattttgaggtcagtttcgattccttctgagactgataagcctataatcgtggagctagcggttgcagctatggaggaactcgtgagaatggctcaaactggagatcctttatggctttcaaccgataattcagtcgagattctcaacgaagaagagtatttcagaacgtttccgagaggaattggaccaaagccattaggattaagatcagaggcgtcaagacaatctgcagttgttataatgaatcacatcaatctcgttgagattctcatggatgtgaatcaatggtcttgtgttttctctgggattgtgtcaagagccttgacacttgaagttctttcaactggagttgctgggaactacaacggtgctttacaagtgatgacagctgagtttcaagttccatcacccctagtcccaacgcgtgagaactactttgtgagatactgcaaacaacacagtgacggctcttgggctgtggttgatgtctctttggacagccttagaccaagtactccaatcttaagaactagaagaaggccttcaggttgtctgattcaagaattgcctaatggttattctaaggttacatggatagagcatatggaggtagatgatagatcagttcacaacatgtataaaccgttggttcagtccggtttagctttcggtgcgaaacgttgggtggctacactcgaacgacaatgcgagcggcttgctagctccatggccagcaacattcctggtgatctttccgtgataacgagtcctgaaggaaggaagagtatgttgaagctagctgagagaatggttatgagtttctgcagtggtgttggcgcgtcgactgcacacgcttggacaacaatgtcgacaacaggatccgatgatgttcgggtcatgacccgcaagagtatggatgatccaggaagacctccgggtattgttcttagtgcagctacttcattctggatcccagttgctcccaaacgtgtttttgatttcctccgtgacgaaaattcaagaaaagagtgggatattctgtcaaatggaggtatggttcaggaaatggctcatatagccaatggtcatgaacctggaaactgtgtctccttgctccgagtcaatagtggaaactcgagccagagcaacatgttgattctacaagagagctgtacagatgcatcaggatcgtatgtgatttacgcgccagtggatatagtggcgatgaatgtggttctaagcggtggagatcctgattacgtggcgttgttgccgtctggttttgctattttaccggatggttcggttggaggaggagatgggaatcagcatcaggaaatggtttctactacttcttctgggagttgtggtggttcgcttttaaccgttgcgtttcagattcttgttgactctgttcctacagctaaactctcacttggctcggtggctacggttaatagtctgatcaaatgtacggtggagaggattaaagctgctgtttcttgtgatgttggaggaggagcgtag

SEQ ID NO: 579 - protein, 743 aa, Arabidopsis thaliana
MYHPNMFESHHMFDMTPKSTSDNDLGITGSREDDFETKSGTEVTTENPSGEELQDPSQRPNKKKRYHRHTQRQIQELESFFKECPHPDDKQRKELSRDLNLEPLQVKFWFQNKRTQMKAQSERHENQILKSDNDKLRAENNRYKEALSNATCPNCGGPAAIGEMSFDEQHLRIENARLREEIDRISAIAAKYVGKPLGSSFAPLAIHAPSRSLDLEVGNFGNQTGFVGEMYGTGDILRSVSIPSETDKPIIVELAVAAMEELVRMAQTGDPLWLSTDNSVEILNEEEYFRTFPRGIGPKPLGLRSEASRQSAVVIMNHINLVEILMDVNQWSCVFSGIVSRALTLEVLSTGVAGNYNGALQVMTAEFQVPSPLVPTRENYFVRYCKQHSDGSWAVVDVSLDSLRPSTPILRTRRRPSGCLIQELPNGYSKVTWIEHMEVDDRSVHNMYKPLVQSGLAFGAKRWVATLERQCERLASSMASNIPGDLSVITSPEGRKSMLKLAERMVMSFCSGVGASTAHAWTTMSTTGSDDVRVMTRKSMDDPGRPPGIVLSAATSFWIPVAPKRVFDFLRDENSRKEWDILSNGGMVQEMAHIANGHEPGNCVSLLRVNSGNSSQSNMLILQESCTDASGSYVIYAPVDIVAMNVVLSGGDPDYVALLPSGFAILPDGSVGGGDGNQHQEMVSTTSSGSCGGSLLTVAFQILVDSVPTAKLSLGSVATVNSLIKCTVERIKAAVSCDVGGGA

SEQ ID NO: 580 - DNA, 2385 bp, Arabidopsis thaliana
accaaactcacatagcaatcacacacatctccacaaacacagcttgagatgatcatgaaacacgtgcatcctcagatctctatcaatccagcttggtgaaagaaggtcaagaattgaaagagaatcaaagaaaacgacgtcgtttcattcgtgtgtaacaactactaattatacatagatggctgcttactttcacggaaacccaccggagatctctgccggatccgacggtggtcttcaaacgttgatcctcatgaatccaactacttacgttcagtacacccaacaagacaacgactcgaacaacaacaacaacagcaacaatagcaacaacaacaacacaaacacaaacacaaacaacaacaacagtagtttcgttttcctcgattcccacgcgccgcagccaaacgcgagccagcagttcgtcggaataccactctcaggtcacgaagctgcttccattacagccgccgacaacatctccgtacttcacggttatcctccgcgcgtgcagtacagtctctacggtagccaccaagtggatcccactcaccagcaagccgcgtgtgagacgccacgcgcgcagcaaggcctctctttaaccctctcgtctcaacagcagcagcaacagcaacatcatcaacaacaccagcctattcacgtcggattcgggtccggacatggagaagatatccgggtcgggtctggctctacaggatcgggggtaacaaacggtatagctaatcttgttagctccaagtacttgaaggcagcacaagagcttcttgacgaagtagtcaacgctgattccgatgacatgaacgctaaatcccaactattctcatcgaaaaagggtagttgcggaaatgataaacctgtcggagaatcatcggccggcgctggaggagaaggttccggtggcggagcagaagcagccgggaaacgtccggtggagctaggcacggcagagagacaagaaatacagatgaagaaagcaaaacttagtaacatgcttcatgaggtggagcagagatatagacagtaccaccagcagatgcagatggtgatctcttcgttcgagcaagcggcagggataggatcagcgaagtcatacacgtcgctagcattgaaaaccatatcaagacagttccgttgcttgaaagaggcgatcgctggtcagataaaagcggccaacaagagtcttggggaggaagattcagtgtctggtgttgggaggtttgaggggtcgaggctcaagttcgtggaccaccacttgagacagcaaagagctcttcaacaactgggaatgattcaacatccttccaataatgcttggagacctcaacgtggtctcccagaacgagccgtctcagttctccgtgcttggctcttcgaacactttcttcatccataccctaaggattcggacaagcacatgctagctaagcaaacaggactcactcgtagccaggtgtcgaactggtttataaacgcgagagttcggttatggaaaccaatggtggaggagatgtacatggaggaaatgaaggagcaggcaaagaacatgggatccatggaaaagactcctttggatcaaagcaacgaagattctgcttcaaagtcaacaagtaaccaagaaaagagcccaatggcggacactaattaccatatgaatcccaatcacaacggtgacctagaaggcgtcactggaatgcaaggatgccccaagagactaagaaccagcgacgagacaatgatgcagccaataaatgcggatttcagctccaacgagaagctcacgatgaagattctagaagaacggcaagggataagatcagatggtggctaccctttcatgggtaatttcgggcaataccaaatggatgagatgtcaagatttgatgtagtctcagaccaggagctcatggcgcaaaggtactcaggaaacaacaatggcgtgtccctcacgttaggtttacctcattgtgatagcttgtcgtccacggaccatcagggtttcatgcagacccaccatgggattcctatagggagaagagtgaaaataggagaaacagaggaatatggacccgccaccatcaatggtggtagctcgaccacaaccgcacattcatcagcggcagctgccgcggcttacaatgggatgaacatacagaaccagaagagatatgtggctcagttattgcccgacttcgttgcataaacccatctctctagaaggagaaaccgaaacaggttattatatacgtttctagtttttaattagtatatagtttctcataccattgaaccaaaacaaagaacaaaatttaattttagtctttggttatatatggccgacgggctacgtcagggccctgacgtagc

SEQ ID NO: 581 - protein, 680 aa, Arabidopsis thaliana
MAAYFHGNPPEISAGSDGGLQTLILMNPTTYVQYTQQDNDSNNNNNSNNSNNNNTNTNTNNNNSSFVFLDSHAPQPNASQQFVGIPLSGHEAASITAADNISVLHGYPPRVQYSLYGSHQVDPTHQQAACETPRAQQGLSLTLSSQQQQQQQHHQQHQPIHVGFGSGHGEDIRVGSGSTGSGVTNGIANLVSSKYLKAAQELLDEVVNADSDDMNAKSQLFSSKKGSCGNDKPVGESSAGAGGEGSGGGAEAAGKRPVELGTAERQEIQMKKAKLSNMLHEVEQRYRQYHQQMQMVISSFEQAAGIGSAKSYTSLALKTISRQFRCLKEAIAGQIKAANKSLGEEDSVSGVGRFEGSRLKFVDHHLRQQRALQQLGMIQHPSNNAWRPQRGLPERAVSVLRAWLFEHFLHPYPKDSDKHMLAKQTGLTRSQVSNWFINARVRLWKPMVEEMYMEEMKEQAKNMGSMEKTPLDQSNEDSASKSTSNQEKSPMADTNYHMNPNHNGDLEGVTGMQGCPKRLRTSDETMMQPINADFSSNEKLTMKILEERQGIRSDGGYPFMGNFGQYQMDEMSRFDVVSDQELMAQRYSGNNNGVSLTLGLPHCDSLSSTDHQGFMQTHHGIPIGRRVKIGETEEYGPATINGGSSTTTAHSSAAAAAAYNGMNIQNQKRYVAQLLPDFVA

SEQ ID NO: 582 - DNA, 904 bp, Arabidopsis thaliana
atccacacacacacacatctctctctatataaccctaagtgtttggagatagcatcactagagaacacacacacaaagcatcaatatttgtctgaacggagaatgagtcctgtggcttcaacgaggtggtgtccgacgccggagcaactgatgatcttggaagagatgtaccggagtggtatacggactccgaatgcggtgcagatacaacagatcacagctcacttggcgttctatggaagaatcgagggcaaaaacgtcttttactggttccagaaccataaggctagagatagacagaagctgaggaagaaactagccaagcaacttcaccagcaacaacatcaacttcaactccaacttcagcagatcaaaccaaaaccaatatcatcgatgatttctcaaccagttaataagaatatcatcgatcatcacaatccttatcatcatcaccatcataatcatcatcataatcatcatcgtccatatgatcatatgtcctttgattgctgctctcatccttctcccatgtgtcttcctcatcagggaactggagtaggagaagctccaagcaaagtgatgaatgaatattactgcaccaaaagtggagctgaagagatattgatgcaaaaatcaatcacgggtccaaactcatcgtacggtcgagattggatgatgatgatggatatgggcccacgaccatcatatccctcatcatcatcatcacccatttcatgttgtaacatgatgatgagcagtccaaagataccattgaaaaccctggaacttttcccaatctcatctatcaactccaaacaagacagtaccaaactttaaagaaaagacaacaaatacaaaagagattctgcaggtgtttcattcatgtatcactgtatgatgtgtc

SEQ ID NO: 583 - protein, 244 aa, Arabidopsis thaliana
MSPVASTRWCPTPEQLMILEEMYRSGIRTPNAVQIQQITAHLAFYGRIEGKNVFYWFQNHKARDRQKLRKKLAKQLHQQQHQLQLQLQQIKPKPISSMISQPVNKNIIDHHNPYHHHHHNHHHNHHRPYDHMSFDCCSHPSPMCLPHQGTGVGEAPSKVMNEYYCTKSGAEEILMQKSITGPNSSYGRDWMMMMDMGPRPSYPSSSSSPISCCNMMMSSPKIPLKTLELFPISSINSKQDSTKL

SEQ ID NO: 584 - DNA, 984 bp, Arabidopsis thaliana
atggatggaatgtacaatttccattcggccggtgattattcagataagtcggttctgatgatgtcaccggagagtctcatgtttccttccgattaccaagctttgctatgttcctccgccggtgaaaatcgtgtctctgatgttttcggatccgacgagctactctcagtagccgtctccgctttgtcgtcggaggcggcttcgatcgctccggagatccgaagaaatgatgataacgtttctctaactgtcatcaaagctaaaatcgcttgtcatccttcgtatcctcgcttacttcaagcttacatcgattgccaaaaggtcggagcaccaccggagatagcgtgtttactagaggagattcaacgggagagtgatgtttataagcaagaggttgttccttcttcttgctttggagctgatcctgagcttgatgaatttatggaaacgtactgcgatatattagtgaaatacaaatcggatctagcaagaccgtttgacgaggcaacgtgtttcttgaacaagattgagatgcagctacggaacctatgtactggtgtcgagtctgccaggggagtttctgaggatggtgtaatatcatctgacgaggaactgagtggaggtgatcatgaggtagcagaggatgggagacaaagatgtgaagaccgggacctcaaagataggttgctacgcaaatttggaagccgtattagtactttaaagcttgagttctcaaagaagaagaagaaaggaaagttaccaagagaagcaagacaagctcttcttgattggtggaatctccattataagtggccttaccctactgaaggagataagatagcattagctgatgcaacggggttagaccaaaaacaaatcaacaattggtttataaaccaaaggaaacgtcattggaagccatcagagaatatgcctttcgctatgatggatgattctagtggatcattctttaccgaggaatga

SEQ ID NO: 585 - protein, 327 aa, Arabidopsis thaliana
MDGMYNFHSAGDYSDKSVLMMSPESLMFPSDYQALLCSSAGENRVSDVFGSDELLSVAVSALSSEAASIAPEIRRNDDNVSLTVIKAKIACHPSYPRLLQAYIDCQKVGAPPEIACLLEEIQRESDVYKQEVVPSSCFGADPELDEFMETYCDILVKYKSDLARPFDEATCFLNKIEMQLRNLCTGVESARGVSEDGVISSDEELSGGDHEVAEDGRQRCEDRDLKDRLLRKFGSRISTLKLEFSKKKKKGKLPREARQALLDWWNLHYKWPYPTEGDKIALADATGLDQKQINNWFINQRKRHWKPSENMPFAMMDDSSGSFFTEE

SEQ ID NO: 586 - DNA, 1164 bp, Arabidopsis thaliana
atggcgtcgtctccgttgactgcaaatgttcagggtaccaacgcttctttgaggaatagagatgaagaaactgcagacaagcagatacaattcaatgaccaaagttttgggggaaatgactatgcacccaaggtacggaagccatacacgataacaaaagagagagagagatggacagatgaagagcacaagaagtttgttgaagccttgaaattatacgggcgagcttggagacgaatagaagaacatgtgggctcaaagaccgcagttcagattcgaagccatgctcagaagtttttctctaaggttgctcgagaagcaactggaggtgatgggagctcagtagagccgattgtaatacctcctcctcgtcccaagagaaagccagcgcatccgtaccctcgtaagtttgggaacgaggcagatcaaacaagtagatcggtttctccctcagaacgtgatactcaatctccaacctctgtgttgtccactgttggatcagaagcattgtgttcccttgattcgagttcacccaatcgaagcttgtccccagtttcttctgcatcaccaccagctgctcttacaaccactgcaaatgcacctgaagagcttgagactctgaagctggagttgtttcctagtgagagactcttaaacagggagagctcgatcaaggaaccaacgaagcaaagtcttaaactctttgggaagacagttttggtatctgattcaggcatgtcctcttctctaacaacttcaacatattgtaaatccccaattcagccattaccacggaaactctcatcatccaagacactacccataataagaaactcacaagaagaactcttgagctgctggatacaagtccctcttaagcaagaagatgtggaaaatagatgtttggattcaggaaaggctgtccaaaacgaaggatcatcgactggatcaaacactggttcggtggatgatacgggacacacggaaaagaccacagaacccgaaacaatgctatgtcaatgggagtttaaaccaagtgagaggtctgcattttctgagctcagaagaacaaactccgagtcaaattcaagaggatttggtccatacaagaagagaaagatggtaacagaagaagaagagcatgagattcatctccacttataa

SEQ ID NO: 587 - protein, 387 aa, Arabidopsis thaliana
MASSPLTANVQGTNASLRNRDEETADKQIQFNDQSFGGNDYAPKVRKPYTITKERERWTDEEHKKFVEALKLYGRAWRRIEEHVGSKTAVQIRSHAQKFFSKVAREATGGDGSSVEPIVIPPPRPKRKPAHPYPRKFGNEADQTSRSVSPSERDTQSPTSVLSTVGSEALCSLDSSSPNRSLSPVSSASPPAALTTTANAPEELETLKLELFPSERLLNRESSIKEPTKQSLKLFGKTVLVSDSGMSSSLTTSTYCKSPIQPLPRKLSSSKTLPIIRNSQEELLSCWIQVPLKQEDVENRCLDSGKAVQNEGSSTGSNTGSVDDTGHTEKTTEPETMLCQWEFKPSERSAFSELRRTNSESNSRGFGPYKKRKMVTEEEEHEIHLHL

SEQ ID NO: 588 - DNA, 1077 bp, Arabidopsis thaliana
atgggtcatcactcatgctgcaacaagcaaaaggtgaagagagggctttggtcacctgaagaagacgaaaagctcatcaactacatcaattcatatggccatggatgttggagctctgttcctaaacatgcaggtttgcagagatgtggaaagagttgtagattaagatggataaattatctaagacctgatcttaaacgtggaagcttctctcctcaagaagctgctcttatcattgagcttcacagcattcttggtaacagatgggctcaaattgctaaacatctacctggaagaacagataacgaggtcaagaatttctggaactcgagcattaaaaagaagctcatgtctcaccatcatcacggtcatcatcatcatcatctctcttccatggcgagtttgctcacaaaccttccttatcacaatggattcaaccctactacagtcgacgatgaaagttcaagattcatgtccaatatcatcacaaacactaaccctaatttcatcactccaagccatctctctcttccttctcctcatgttatgaccccattgatgttcccaacctctagagaaggagatttcaagtttctaaccacaaacaacccaaaccaatctcatcaccatgataataaccattacaacaacctcgacattttgtcacccacaccaactataaacaatcatcatcaaccttcactttcttcttgtcctcatgataataatctccaatggccagcgttaccagatttcccagcgagtaccatttctggtttccaagaaacccttcaagattatgatgatgctaataaactcaacgtgtttgtgacaccattcaacgataatgccaaaaagttattatgtggagaagttctcgaaggcaaagtactatcttcctcctcaccaatttcacaagatcacggcctttttcttcccaccacgtacaactttcaaatgacttctacgagtgatcatcaacatcatcatcgagtggactcatacatcaatcacatgatcataccatcatcatcctcatcgtcgccaatctcttgtggacagtacgtcataacttaa

SEQ ID NO: 589 - protein, 358 aa, Arabidopsis thaliana
MGHHSCCNKQKVKRGLWSPEEDEKLINYINSYGHGCWSSVPKHAGLQRCGKSCRLRWINYLRPDLKRGSFSPQEAALIIELHSILGNRWAQIAKHLPGRTDNEVKNFWNSSIKKKLMSHHHHGHHHHHLSSMASLLTNLPYHNGFNPTTVDDESSRFMSNIITNTNPNFITPSHLSLPSPHVMTPLMFPTSREGDFKFLTTNNPNQSHHHDNNHYNNLDILSPTPTINNHHQPSLSSCPHDNNLQWPALPDFPASTISGFQETLQDYDDANKLNVFVTPFNDNAKKLLCGEVLEGKVLSSSSPISQDHGLFLPTTYNFQMTSTSDHQHHHRVDSYINHMIIPSSSSSSPISCGQYVIT

SEQ ID NO: 590 - DNA, 1144 bp, Arabidopsis thaliana
cgtcgacctcccaacactaactccatgtttataacggaaaaacaagtgtggatggatgagatcgtcgcaagaagagcttcttcttcttgggacttccctttcaacgacattaatattcatcagcatcatcatcgtcactgcaacacaagtcatgagtttgaaatcttgaagagtcctcttggagatgtagcggttcacgaagaagagagtaataataataaccctaatttcagtaacagcgagagtggtaagaaggagacaacagatagtggtcagtcttggtcctcgtcgtcttcaaaaccatcggtcttggggagaggacattggagaccagctgaagatgttaaactcaaagagcttgtctccatttacggcccacaaaactggaacctcatagctgaaaagcttcaaggaagatctgggaagagctgtagactacgatggtttaaccaattggacccgaggataaaccgaagagctttcacagaagaagaagaggagaggctgatgcaagcacataggctttatggtaacaaatgggcaatgattgcgaggcttttccctggtagaactgataattcagtgaagaaccattggcatgttgtcatggctcgtaagtatagagaacactcttctgcttaccgtaggagaaagcttatgagtaataatccacttaaacctcacctcaccaataatcatcatcctaaccctaaccctaattaccactcttttatctccactaatcattacttcgctcagcctttccccgagtttaatttgactcatcacctggttaataatgcccctatcacgagtgaccataaccagcttgtgttgcctttccattgctttcaaggttatgagaacaatgaacctccgatggttgtgagtatgtttggcaaccaaatgatggtcggcgataacgttggtgccacgtcagacgcgttatgcaatattccgcacattgaccctagtaaccaagagaaaccggagccaaatgatgcaatgcattggatcggaatggacgcggtagatgaggaggtgttcgaaaaggctaagcagcaaccacattttttcgattttcttggcttggggacggcgtgaatgttgaacaaattggtgttaatcagataacgacagtggc

SEQ ID NO: 591 - protein, 359 aa, Arabidopsis thaliana
MFITEKQVWMDEIVARRASSSWDFPFNDINIHQHHHRHCNTSHEFEILKSPLGDVAVHEEESNNNNPNFSNSESGKKETTDSGQSWSSSSSKPSVLGRGHWRPAEDVKLKELVSIYGPQNWNLIAEKLQGRSGKSCRLRWFNQLDPRINRRAFTEEEEERLMQAHRLYGNKWAMIARLFPGRTDNSVKNHWHVVMARKYREHSSAYRRRKLMSNNPLKPHLTNNHHPNPNPNYHSFISTNHYFAQPFPEFNLTHHLVNNAPITSDHNQLVLPFHCFQGYENNEPPMVVSMFGNQMMVGDNVGATSDALCNIPHIDPSNQEKPEPNDAMHWIGMDAVDEEVFEKAKQQPHFFDFLGLGTA

SEQ ID NO: 592 - DNA, 1387 bp, Arabidopsis thaliana
agcaagtccaaatctccctctctctctctctatctatctctctatagaagattttttaactaagaagctagcgatcatggccacagcgatgaacgttttctctaccaaatggtcctccgaattggatatagaagaatatagtatcatccaccaattccacatgaactcactcgtcggagatgttccacagtctctctcatctcttgatgataccaccacttgttataaccttgatgcttcttgtaataaaagtttggtagaagaaagaccttcaaagatcctcaagaccactcacatatcaccaaacttacatcctttttcttcttctaatcctcctcctccaaagcaccagccctcttctaggattctttcttttgaaaagacaggtttacatgttatgaatcacaactctccaaacttaatatttagccccaaggacgaagaaattggattaccagagcataagaaagccgagctgataataagagggacaaagagagctcaatccttgactcgaagccaatcaaatgctcaagatcacatactggcagagagaaaacggagagagaagcttactcaaagatttgtagctctttccgcgctaattcctggcctaaagaagatggacaaggcttctgtgttgggagatgcaataaagcatataaagtacctccaagagagtgtgaaagagtatgaggaacaaaagaaggaaaagacaatggaatcagtggttcttgtaaagaagtctagtctggttttagatgaaaatcatcaaccatcatcatcatcttcctcagatggaaatcgcaatagctcgagctcaaatcttccagaaatagaagttagggtttcaggaaaagatgttcttattaagatcctatgcgagaagcaaaagggtaatgtgatcaagattatgggggagattgaaaagcttggtttgtctatcaccaacagcaatgtcttgccctttggacccacttttgacatctctattatcgctcagaagaataacaattttgatatgaaaatcgaggatgttgtgaagaacttgagttttggcttatcaaagctcacttaattggtttcacgttacatacatatacacattcatcatcgatttctccgatcgaagaatccaaaatcagtttttccatgaaagtggttttttagttgttaagtttgttgtatggagattcttaagtcatttaaagatccttgttcttgtgttgttaagtgtgctttaagatgcatatcatcaaatgtttagtaattatttctctccagtttcatttgggacggaatttttttcgcagttgttggatatatatttcctgcgatgtaaagcatttcgttagtttaataaacgtccgatatgtttctttgaaaa

SEQ ID NO: 593 - protein, 333 aa, Arabidopsis thaliana
MATAMNVFSTKWSSELDIEEYSIIHQFHMNSLVGDVPQSLSSLDDTTTCYNLDASCNKSLVEERPSKILKTTHISPNLHPFSSSNPPPPKHQPSSRILSFEKTGLHVMNHNSPNLIFSPKDEEIGLPEHKKAELIIRGTKRAQSLTRSQSNAQDHILAERKRREKLTQRFVALSALIPGLKKMDKASVLGDAIKHIKYLQESVKEYEEQKKEKTMESVVLVKKSSLVLDENHQPSSSSSSDGNRNSSSSNLPEIEVRVSGKDVLIKILCEKQKGNVIKIMGEIEKLGLSITNSNVLPFGPTFDISIIAQKNNNFDMKIEDVVKNLSFGLSKLT

SEQ ID NO: 594 - DNA, 777 bp, Arabidopsis thaliana
atgaaaatgatgcaagaggagggaaaccgaaaaggtccatggacagaacaggaagacatacttctggtaaattttgttcacttatttggagatcgacgatgggattttatagcaaaagtatcaggtttgaacagaacaggaaagagttgcaggctaagatgggttaattacctacatcctggtctcaaacgtggcaagatgacgcctcaagaagagcgcctcgtccttgagcttcacgctaagtggggaaacaggtggtcgaaaatagcccgaaaattgccgggacgaacggataacgagataaagaactactggaggactcatatgaggaagaaagctcaagaaaagaagcgtcctgtttccccaacttcctcattttccaactgcagctcgtcatctgtgaccactaccaccaccaatactcaagatacatcgtgccactcgcgtaaatcttcaggggaagtgagcttttacgacactggaggttcccgatccactagagagatgaatcaagaaaacgaagacgtgtactcgttggatgatatatggagagagattgatcactcagcagtaaacataataaaaccggttaaagacatctactcagaacaaagccattgcttaagttacccaaatctagcttcaccatcatgggaaagctcattggattctatatggaacatggatgcagataaaagtaagatatcgtcttactttgcaaatgatcagtttcctttctgtttccaacacagtagatcaccatggtcgtcaggttaa

SEQ ID NO: 595 - protein, 258 aa, Arabidopsis thaliana
MKMMQEEGNRKGPWTEQEDILLVNFVHLFGDRRWDFIAKVSGLNRTGKSCRLRWVNYLHPGLKRGKMTPQEERLVLELHAKWGNRWSKIARKLPGRTDNEIKNYWRTHMRKKAQEKKRPVSPTSSFSNCSSSSVTTTTTNTQDTSCHSRKSSGEVSFYDTGGSRSTREMNQENEDVYSLDDIWREIDHSAVNIIKPVKDIYSEQSHCLSYPNLASPSWESSLDSIWNMDADKSKISSYFANDQFPFCFQHSRSPWSSG

SEQ ID NO: 596 - DNA, 755 bp, Arabidopsis thaliana
caacacttctcagtgaccgtgagcaacgaattattttcagttcaacgactccgcggaaatggaaaattcagaaaatgttccctcttacgatcaaaacatcaatttcactcctaatttgacgagagatcaagaacatgtgatcatggtctctgctttgcaacaagtaatatccaacgtcggaggtgacacgaactcgaatgcatgggaagctgatcttccacctttgaacgctggcccttgtcctctttgtagtgtcaccggctgctacggttgcgtcttcccacgacacgaggcgataattaagaaggagaagaagcacaaaggagtgaggaaaaaaccatcaggtaaatgggcggcggagatatgggatccgagtttgaaagtaaggagatggcttggaacgtttccaacagcggagatggcggctaaggcttacaacgatgcggcggctgagtttgtcggaagaagatcagcaagacgtggcacaaagaacggagaggaagcatctaccaagaagacgactgagaaaaattaacggagaaggagcacgtatagaaaggcaggaagaggcatcttacttgcttcacaagtaaatcagaatttttttgaaaagtaaaaacgttattttgtttggtaataaaataaagtaaaacaaaatattgctaacgcaagacttatcaagttcagtcgtgactgtgagtgtgtttttatgtatcttacttcattttttgtctttcaattgtgtgtgtgtgtgt

SEQ ID NO: 597 - protein, 158 aa, Arabidopsis thaliana
MENSENVPSYDQNINFTPNLTRDQEHVIMVSALQQVISNVGGDTNSNAWEADLPPLNAGPCPLCSVTGCYGCVFPRHEAIIKKEKKHKGVRKKPSGKWAAEIWDPSLKVRRWLGTFPTAEMAAKAYNDAAAEFVGRRSARRGTKNGEEASTKKTTEKN

SEQ ID NO: 598 - DNA, 1136 bp, Arabidopsis thaliana
cccttttcctctctttctccaaatctctgaaaattttcaccagaatctctgttctttttttcaccagaatctctctgtttaaaataataggtgatgatgatggatgagtttatggatcttagaccagtgaagtacacagagcacaagactgttatcagaaagtacactaaaaagtcgtctatggagaggaagaccagtgttcgtgactcggccaggttggttcgggtctcaatgacggatcgtgacgccactgattcatcaagcgacgaggaagagtttctgttccctcgaagacgtgtcaagagattgattaacgagatcagagtcgagcctagcagctcttccaccggcgacgtctctgcttctccgacgaaggaccggaaaagaatcaacgttgattctacggttcaaaagccctctgtttccggccaaaaccagaagaagtaccgcggcgtgagacagcgaccatggggaaaatgggcggcggagattcgtgatcctgagcaacgccggagaatctggctcggtacttttgcaacggcggaggaagctgccatcgtctacgacaacgcagcaatcaaacttcgtggccctgatgctcttaccaacttcaccgtacaaccagaaccagaaccggtacaagaacaagaacaagaaccggagagcaacatgtcggtttcgatatcagaatcaatggacgattctcaacatctatcatctccgacatcggttctcaactaccaaacatatgtctcggaggaaccaatcgatagtcttatcaaaccggttaaacaagagtttcttgaaccagaacaagagccaataagctggcatcttggagaaggtaatactaatactaatgatgattcatttccattggacattacatttctcgacaactatttcaatgaatcattaccagacatctccatcttcgatcaacctatgtctcctattcaaccaacagagaatgatttcttcaacgaccttatgttattcgatagcaacgcagaagaatactactcctccgagatcaaagagattggttcatcgttcaacgatcttgatgattctttgatatccgatctcttacttgtgtgatatttttgccattaaccaaacaccggtttggttgc

SEQ ID NO: 599 - protein, 335 aa, Arabidopsis thaliana
MMMDEFMDLRPVKYTEHKTVIRKYTKKSSMERKTSVRDSARLVRVSMTDRDATDSSSDEEEFLFPRRRVKRLINEIRVEPSSSSTGDVSASPTKDRKRINVDSTVQKPSVSGQNQKKYRGVRQRPWGKWAAEIRDPEQRRRIWLGTFATAEEAAIVYDNAAIKLRGPDALTNFTVQPEPEPVQEQEQEPESNMSVSISESMDDSQHLSSPTSVLNYQTYVSEEPIDSLIKPVKQEFLEPEQEPISWHLGEGNTNTNDDSFPLDITFLDNYFNESLPDISIFDQPMSPIQPTENDFFNDLMLFDSNAEEYYSSEIKEIGSSFNDLDDSLISDLLLV

SEQ ID NO: 600 - DNA, 1123 bp, Arabidopsis thaliana
aaacacaaacaaaactcatattttcaatctccaggtgctttacaccaacagagtcgcaagaaaacaaaaaccaaactcggatttagtttgacagaagaaggaatcgagagtcgggtatgcattatcctaacaacagaaccgaattcgtcggagctccagccccaacccggtatcaaaaggagcagttgtcaccggagcaagagctttcagttattgtctctgctttgcaacacgtgatctcaggggaaaacgaaacggcgccgtgtcagggtttttccagtgacagcacagtgataagcgcgggaatgcctcggttggattcagacacttgtcaagtctgtaggatcgaaggatgtctcggctgtaactactttttcgcgccaaatcagagaattgaaaagaatcatcaacaagaagaagagattactagtagtagtaacagaagaagagagagctctcccgtggcgaagaaagcggaaggtggcgggaaaatcaggaagaggaagaacaagaagaatggttacagaggagttaggcaaagaccttggggaaaatttgcagctgagatcagagatcctaaaagagccacacgtgtttggcttggtactttcgaaaccgccgaagatgcggctcgagcttatgatcgagccgcgattggattccgtgggccaagggctaaactcaacttcccctttgtggattacacgtcttcagtttcatctcctgttgctgctgatgatataggagcaaaggcaagtgcaagcgccagtgtgagcgccacagattcagttgaagcagagcaatggaacggaggaggaggggattgcaatatggaggagtggatgaatatgatgatgatgatggattttgggaatggagattcttcagattcaggaaatacaattgctgatatgttccagtgataaatgagctctttcttgttggcgttttttggagttaagtgcaagaagagattgacactgtggcttgtttaaagtgaacaagaacaagaaagcatgtaattagtagtctcattcttttgtttgtggtcaattctatgtttatctcatataaaatctgagttaaacctatctgaggagagagtaaataaagaggttaagaa

SEQ ID NO: 601 - protein, 268 aa, Arabidopsis thaliana
MHYPNNRTEFVGAPAPTRYQKEQLSPEQELSVIVSALQHVISGENETAPCQGFSSDSTVISAGMPRLDSDTCQVCRIEGCLGCNYFFAPNQRIEKNHQQEEEITSSSNRRRESSPVAKKAEGGGKIRKRKNKKNGYRGVRQRPWGKFAAEIRDPKRATRVWLGTFETAEDAARAYDRAAIGFRGPRAKLNFPFVDYTSSVSSPVAADDIGAKASASASVSATDSVEAEQWNGGGGDCNMEEWMNMMMMMDFGNGDSSDSGNTIADMFQ

SEQ ID NO: 602 - DNA, 933 bp, Arabidopsis thaliana
aaaaaaaaaaaaaaaaaaaaacttatggaatattcccaatcttccatgtattcatctccaagttcttggagctcatcacaagaatcactcttatggaacgagagctgtttcttggatcaatcatctgaacctcaagccttcttttgccctaattatgattactccgatgactttttctcatttgagtcaccggagatgatgattaaggaagaaattcaaaacggcgacgtttctaactccgaagaagaagaaaaggttggaattgatgaagaaagatcatacagaggagtgaggaaaaggccgtgggggaaatttgcagcggagataagagattcaacgaggaatggaattagggtttggctcgggacatttgacaaagccgaggaagccgctcttgcttatgatcaagcggctttcgccacaaaaggatctcttgcaacacttaatttcccggtggaagtggttagagagtcgctaaagaaaatggagaatgtgaatcttcatgatggaggatctccggttatggccttgaagagaaaacattctcttcgaaaccggcctagagggaaaaagcgatcctcttcttcttcttcttcttcttctaattcttcttcttgctcttcttcttcgtctacttcttcaacatcaagaagtagtagtaagcagagtgttgtgaagcaagaaagtggtacacttgtggtttttgaagatttaggtgctgagtatttagaacaacttcttatgagctcatgttgatcttgtaattgatttcagcaaaagccactattaaactttaattttgtgataattaatcttgaaatttgttttgttcattctgcaatttctttggttctcttattttttgtttgttgtatccaaatgaaattattggaagagatggtgatgttaaagtgtatatatataaaaaaaaaa

SEQ ID NO: 603 - protein, 243 aa, Arabidopsis thaliana
MEYSQSSMYSSPSSWSSSQESLLWNESCFLDQSSEPQAFFCPNYDYSDDFFSFESPEMMIKEEIQNGDVSNSEEEEKVGIDEERSYRGVRKRPWGKFAAEIRDSTRNGIRVWLGTFDKAEEAALAYDQAAFATKGSLATLNFPVEVVRESLKKMENVNLHDGGSPVMALKRKHSLRNRPRGKKRSSSSSSSSSNSSSCSSSSSTSSTSRSSSKQSVVKQESGTLVVFEDLGAEYLEQLLMSSC

SEQ ID NO: 604 - DNA, 1031 bp, Arabidopsis thaliana
atatgtacttgtacaccaacccaccaaaagagataaaagaggaaacaaaaactcgaaaagagagagatatatgggtgaggtggcttatatggacgaaggagacctagaagcaatagtcagaggctactccggctccggagacgcgttttccggcgaaagttccggtacgttttcaccttcgttttgcctaccgatggagacgtctagtttctacgaaccggagatggagacaagtggcttagatgagctcggtgaactttacaaacccttttaccctttctccacacaaacgatcctcacaagctcggtctctctccctgaagattcaaaacctttccgagatgacaagaaacaacgatcacatggttgtcttttatccaacggatcaagagctgatcatatccgaatttcagaatccaaatcaaagaaaagcaagaagaatcaacagaagagagttgttgagcaagtgaaagaagagaatctgttgtcggacgcatgggcgtggcgtaaatacgggcagaaacccatcaaaggatctccatacccaaggagttattacagatgcagtagctcaaaagggtgtttggcaagaaaacaagtcgaaagaaatcctcaaaacccggagaaattcaccataacatacactaatgagcacaatcatgaactaccaacccggagaaactcattagccggttcgactcgagcaaaaacttcccaacccaaaccaaccttaaccaaaaaatccgaaaaagaagttgtttcttcccctacaagtaatcctatgatcccatccgctgatgaatcttctgttgcggttcaagaaatgagcgttgcggaaacgagtacgcaccaagcggctggagcaatcgagggccgccgcttgagtaacggtttaccatcggatttgatgtccgggagcggaacttttccaagttttaccggtgacttcgatgaactattgaatagccaagagttcttcagtgggtatttatggaattactagagagcattaggtgtatgtatatatatat

SEQ ID NO: 605 - protein, 310 aa, Arabidopsis thaliana
MGEVAYMDEGDLEAIVRGYSGSGDAFSGESSGTFSPSFCLPMETSSFYEPEMETSGLDELGELYKPFYPFSTQTILTSSVSLPEDSKPFRDDKKQRSHGCLLSNGSRADHIRISESKSKKSKKNQQKRVVEQVKEENLLSDAWAWRKYGQKPIKGSPYPRSYYRCSSSKGCLARKQVERNPQNPEKFTITYTNEHNHELPTRRNSLAGSTRAKTSQPKPTLTKKSEKEVVSSPTSNPMIPSADESSVAVQEMSVAETSTHQAAGAIEGRRLSNGLPSDLMSGSGTFPSFTGDFDELLNSQEFFSGYLWNY

SEQ ID NO: 606 - DNA, 1432 bp, Arabidopsis thaliana
  misc_feature (1419)..(1419): n is a, c, g, or t
atcaccaatcctataacactctcattctcatcatatcattcttcaatctatataacccattcttaattatactcaacacacattatatttttctgatcatatcattctttcagtccatctatataaccaattcttgatttatacttaaaacacacattatacatctttctcatcatagtttgtatcaatttcctagagtaaactacctaaaggaaaaaaaaaatctattttgggaatcatatactaaaaatggaaggaagagatatgttaagttgggagcaaaagacattgctaagcgagcttatcaatggatttgatgcggccaaaaagcttcaggcacgacttagagaagctccgtcgccgtcgtcatcattttcatcaccggcgacggctgttgctgagactaacgagattctggtgaagcagatagtttcttcctacgagagatctcttcttctgctaaactggtcatcctcaccgagcgtacaacttattccgacgccggttactgtagtcccggtggcaaatcccggcagtgttccagaatctccggcatcgataaacggaagtccgagaagtgaagagtttgccgatggaggaggttctagcgagagtcatcatcgccaagattacattttcaattcaaagaaaagaaagatgttaccaaagtggtcagaaaaagtgagaataagcccagagagaggcttagaaggacctcaagatgatgtctttagctggagaaaatatggtcaaaaagacattttaggcgccaaattcccaaggagttattacagatgcacacatcgtagcacacaaaactgttgggcaacgaaacaagtccagagatcagacggggatgctacggttttcgaagtgacgtacagaggaacacacacttgttcgcaggcgatcacaagaacaccaccattagcctcgccggagaagcgacaagacaccagagtcaaaccagccattacccaaaagccaaaggatattctcgagagtcttaaatccaacttaaccgttcgaaccgatgggcttgatgatggtaaagacgttttctcgttccctgatacgccgccgttttacaattacggaactatcaacggcgagttcggccacgtggagagttctccgatcttcgacgttgttgactggttcaatccaacggtcgagattgacacaactttccccgcgtttttacacgagtcgatttattattaattaaaatttgtaacagagaaatagatagtaactagtaagtaatgatcagcgagagttaaaacataaaagtacttagagtaatctaacgatgcataataaggaatgttcaacaggacttgaacatgatttcaatactaagagagatttatctagctactggtagtagccgcagacttcttgttgtagcttcacttnctttttgttgctt

SEQ ID NO: 607 - protein, 324 aa, Arabidopsis thaliana
MEGRDMLSWEQKTLLSELINGFDAAKKLQARLREAPSPSSSFSSPATAVAETNEILVKQIVSSYERSLLLLNWSSSPSVQLIPTPVTVVPVANPGSVPESPASINGSPRSEEFADGGGSSESHHRQDYIFNSKKRKMLPKWSEKVRISPERGLEGPQDDVFSWRKYGQKDILGAKFPRSYYRCTHRSTQNCWATKQVQRSDGDATVFEVTYRGTHTCSQAITRTPPLASPEKRQDTRVKPAITQKPKDILESLKSNLTVRTDGLDDGKDVFSFPDTPPFYNYGTINGEFGHVESSPIFDVVDWFNPTVEIDTTFPAFLHESIYY

SEQ ID NO: 608 - DNA, 1135 bp, Arabidopsis thaliana
gtacatttttttttgtatttcaggaaactccgatggcggatctcttcggtggtggccacggcggcgagcttatggaagcacttcaacctttttacaaaagtgcttccacgtctgcttcaaatcctgcgtttgcgtcctcaaacgatgcgtttgcgtctgccccaaacgacccattttcttcttcttcttactataatcctcatgcatctttcttcccttcacattccacaaccacttacccggatatttattctggatccatgacctatccatcttcattcgggtcggatcttcaacaacccgaaaactaccaatctcagttccattaccaaaacactatcacttacactcaccaagacaacaacacttgcatgctcaacttcattgagccgagccaaccggattttatgacccaaccgggtccgagttcgggttcggtttcaaaaccggctaagctctatagaggagtgaggcaaagacattggggaaaatgggtcgcggagatccgtttacccaggaaccgaacccgactttggctcggaacattcgacacggctgaagaagccgcgttggcttatgatcgcgccgcgtttaagcttcgtggtgactcggctcggcttaacttcccagctctccgataccaaaccggctcgtctccgtctgacgttggcgaatacggacctattcaagctgccgttgacgccaagctagaagccatattagctgagccgaagaatcagccgggcaaaacggagaggacgtcgaggaaacgagctaaagccgcggcttcttcagctgagcagccgtcagcgccacaacaacattccgggtcgggtgaaagtgatgggtcgggttcaccgacttcggatgttatggtgcaggagatgtgccaagagccagagatgccatggaatgaaaatttcatgctcggcaagtgtccttcttatgagatagattgggcttcaattttatcgtgaaaaattaggattcaattcatttttattcattttaacttgtttgtattttcttttaaactttagggttattagctgtgcgtaaaatttgtaatttagcattttgtatgaatgtaatgcaagtgtgtaaattatggacagctcaagcttttttgttaaaa

SEQ ID NO: 609 - protein, 314 aa, Arabidopsis thaliana
MADLFGGGHGGELMEALQPFYKSASTSASNPAFASSNDAFASAPNDPFSSSSYYNPHASFFPSHSTTTYPDIYSGSMTYPSSFGSDLQQPENYQSQFHYQNTITYTHQDNNTCMLNFIEPSQPDFMTQPGPSSGSVSKPAKLYRGVRQRHWGKWVAEIRLPRNRTRLWLGTFDTAEEAALAYDRAAFKLRGDSARLNFPALRYQTGSSPSDVGEYGPIQAAVDAKLEAILAEPKNQPGKTERTSRKRAKAAASSAEQPSAPQQHSGSGESDGSGSPTSDVMVQEMCQEPEMPWNENFMLGKCPSYEIDWASILS

SEQ ID NO: 610 - DNA, 1062 bp, Arabidopsis thaliana
atggaagaacaacaagaatttgagaaacccatcttcgaattccgtcctaagaagctcagaacctctcgagtttcgagaaatctcatgaagaagactggcttcagagaatctatgaatcattacgaagagctctcttgcaactacggattgagggaaaacccgaagaaaacccagaaatctttactcgatcatcgattctgtacgaggaggaggagaaataaaaagatcctgattcgatgcaaagaatgcgggaaagggtttctttacgagaaatgtctgtttaatcatctccaagtgacgcattctgaagaatctacaagaagaagcctgttttgtaggtttagtattgtgcagaggagaaaaagatcgaagagagtttccaggtacaagaagattcttcctcgattctctgtttcttcttcttcgtgtactatgtttcctgtttctgtggatgatggaggattattagaagtcgctgagtctctgattctcttgtccatgagtggtggaaagttcgtgaatggtttggaacattttggtaaagctctgggttcgactcagagaaaatttgaagacgggttattgagaaatgagcagagacttgttggtgaagctctggattcgaatccagagaagaaacttgtggggataagcagagcatctgttggaacatcgaaagagctttcgggttacttggcaaacaagaagggcagagaagatgatgaattgggtcagcagaaacaggctggagcaagaatacttagagaagaaactgataacgaacagaaacttgttcgtcaagaaactgcatttgaagattcagtatcaggatttgagatgaatatagagcatcggtgtgggctctgtcacaaggttttctcgacttatcaaactcttggtggtcatcagacgttccatagaatgagaaacaaatccaaaagtcaaaccaagagatgcagagaagaatcgatagaagctgaagctgggattaataatggttcagtgacgttgacaataagtgcagagtttgctgaaggctgtttaggtcagtacatgctttaa

SEQ ID NO: 611 - protein, 353 aa, Arabidopsis thaliana
MEEQQEFEKPIFEFRPKKLRTSRVSRNLMKKTGFRESMNHYEELSCNYGLRENPKKTQKSLLDHRFCTRRRRNKKILIRCKECGKGFLYEKCLFNHLQVTHSEESTRRSLFCRFSIVQRRKRSKRVSRYKKILPRFSVSSSSCTMFPVSVDDGGLLEVAESLILLSMSGGKFVNGLEHFGKALGSTQRKFEDGLLRNEQRLVGEALDSNPEKKLVGISRASVGTSKELSGYLANKKGREDDELGQQKQAGARILREETDNEQKLVRQETAFEDSVSGFEMNIEHRCGLCHKVFSTYQTLGGHQTFHRMRNKSKSQTKRCREESIEAEAGINNGSVTLTISAEFAEGCLGQYML

SEQ ID NO: 612 - DNA, 1410 bp, Arabidopsis thaliana
aggctattctcggaaaaacaaagaataaagaatgaattcgttttcacaagtacctcctggcttcagatttcatcctactgatgaagaacttgtagactactacttgaggaaaaaagttgcatcaaagagaatagaaatcgatatcatcaaggatgttgatctttacaagattgagccatgtgatcttcaagagttatgcaagataggaaacgaagagcagagcgaatggtacttctttagtcataaagacaagaagtatcccacgggaactcgaaccaatagagccacgaaagcaggattttggaaagccactggaagagacaaggctatatatataagacatagtcttatcggtatgaggaaaacacttgtgttttacaaaggaagagccccaaatggtcagaaatccgattggatcatgcacgaatatcgcttagaaacaagtgaaaatggaacccctcaggaagaaggatgggtagtatgtagggtattcaagaagaaattggcagcgacagtgaggaaaatgggagattaccattcatcaccatcgcagcattggtacgatgatcagctctcttttatggcctccgagatcatttctagttctccacgacagtttcttcccaatcatcattataaccgccaccatcaccagcagacattgccttgtggcctcaatgcattcaacaacaacaatcctaacttgcaatgcaagcaagagctcgagttacattacaatcaaatggtacaacatcaacaacaaaaccatcatcttcgtgaatctatgtttctccagcttcctcagctcgaaagccctaccagtaattgcaattctgacaacaacaataacacaagaaatattagtaacttgcagaaatcatcaaatatatctcatgaggaacaattgcaacaagggaatcaaagtttcagctctctgtattacgatcaaggagtagagcaaatgactactgactggagagttctcgataaatttgttgcttcacagcttagcaatgatgaagaggctgcagccgtggtttcttcttcttctcatcaaaacaacgtcaagattgacacgagaaacacgggttatcatgtgatagatgagggaataaatttgccggagaatgattctgaaagggttgttgaaatgggagaagagtattcaaatgctcatgctgcttctacttcttcaagttgtcagattgatctctagaaatagtgatagagagatgaaaaagatgcaaggtgaatatatatgaaaatacatgcacactagtgttatttatacttaaagatggaaggggaaaaacaaggagttatttcctggatttatggaggttttgtacataataaaaacctacaaccatatggtattttcttttgaaaaaaaaaaaaaaaaaaaaaaaa

SEQ ID NO: 613 - protein, 394 aa, Arabidopsis thaliana
MNSFSQVPPGFRFHPTDEELVDYYLRKKVASKRIEIDIIKDVDLYKIEPCDLQELCKIGNEEQSEWYFFSHKDKKYPTGTRTNRATKAGFWKATGRDKAIYIRHSLIGMRKTLVFYKGRAPNGQKSDWIMHEYRLETSENGTPQEEGWVVCRVFKKKLAATVRKMGDYHSSPSQHWYDDQLSFMASEIISSSPRQFLPNHHYNRHHHQQTLPCGLNAFNNNNPNLQCKQELELHYNQMVQHQQQNHHLRESMFLQLPQLESPTSNCNSDNNNNTRNISNLQKSSNISHEEQLQQGNQSFSSLYYDQGVEQMTTDWRVLDKFVASQLSNDEEAAAVVSSSSHQNNVKIDTRNTGYHVIDEGINLPENDSERVVEMGEEYSNAHAASTSSSCQIDL

SEQ ID NO: 614 - DNA, 1596 bp, Arabidopsis thaliana
atggatactctctttagactagtcagtctccaacaacaacaacaatccgatagtatcattacaaatcaatcttcgttaagcagaacttccaccaccactactggctctccacaaactgcttatcactacaactttccacaaaacgacgtcgtcgaagaatgcttcaactttttcatggatgaagaagacctttcctcttcttcttctcaccacaaccatcacaaccacaacaatcctaatacttactactctcctttcactactcccacccaataccatcccgccacatcatcaaccccttcctccaccgccgcagccgcagctttagcctcgccttactcctcctccggccaccataatgacccttccgcgttctccatacctcaaactcctccgtccttcgacttctcagccaatgccaagtgggcagactcggtccttcttgaagcggcacgtgccttctccgacaaagacactgcacgtgcgcaacaaatcctatggacgctcaacgagctctcttctccgtacggagacaccgagcaaaaactggcttcttacttcctccaagctctcttcaaccgcatgaccggttcaggcgaacgatgctaccgaaccatggtaacagctgcagccacagagaagacttgctccttcgagtcaacgcgaaaaactgtactaaagttccaagaagttagcccctgggccacgtttggacacgtggcggcaaacggagcaatcttggaagcagtagacggagaggcaaagatccacatcgttgacataagctccacgttttgcactcaatggccgactcttctagaagctttagccacaagatcagacgacacgcctcacctaaggctaaccacagttgtcgtggccaacaagtttgtcaacgatcaaacggcgtcgcatcggatgatgaaagagatcggaaaccgaatggagaaattcgctaggcttatgggagttcctttcaaatttaacattattcatcacgttggagatttatctgagtttgatctcaacgaactcgacgttaaaccagacgaagtcttggccattaactgcgtaggcgcgatgcatgggatcgcttcacgtggaagccctagagacgctgtgatatcgagtttccgacggttaagaccgaggattgtgacggtcgtagaagaagaagctgatcttgtcggagaagaagaaggtggctttgatgatgagttcttgagagggtttggagaatgtttacgatggtttagggtttgcttcgagtcatgggaagagagttttccaaggacgagcaacgagaggttgatgctagagcgtgcagcgggacgtgcgatcgttgatcttgtggcttgtgagccgtcggattccacggagaggcgagagacagcgaggaagtggtcgaggaggatgaggaatagtgggtttggagcggtggggtatagtgatgaggtggcggatgatgtcagagctttgttgaggagatataaagaaggtgtttggtcgatggtacagtgtcctgatgccgccggaatattcctttgttggagagatcagccggtggtttgggctagtgcgtggcggccaacgtaa

SEQ ID NO: 615 - protein, 531 aa, Arabidopsis thaliana
MDTLFRLVSLQQQQQSDSIITNQSSLSRTSTTTTGSPQTAYHYNFPQNDVVEECFNFFMDEEDLSSSSSHHNHHNHNNPNTYYSPFTTPTQYHPATSSTPSSTAAAAALASPYSSSGHHNDPSAFSIPQTPPSFDFSANAKWADSVLLEAARAFSDKDTARAQQILWTLNELSSPYGDTEQKLASYFLQALFNRMTGSGERCYRTMVTAAATEKTCSFESTRKTVLKFQEVSPWATFGHVAANGAILEAVDGEAKIHIVDISSTFCTQWPTLLEALATRSDDTPHLRLTTVVVANKFVNDQTASHRMMKEIGNRMEKFARLMGVPFKFNIIHHVGDLSEFDLNELDVKPDEVLAINCVGAMHGIASRGSPRDAVISSFRRLRPRIVTVVEEEADLVGEEEGGFDDEFLRGFGECLRWFRVCFESWEESFPRTSNERLMLERAAGRAIVDLVACEPSDSTERRETARKWSRRMRNSGFGAVGYSDEVADDVRALLRRYKEGVWSMVQCPDAAGIFLCWRDQPVVWASAWRPT

SEQ ID NO: 616 - DNA, 627 bp, Arabidopsis thaliana
atgatgggataccaaacaaactctaatttctccatgtttttttcctcggaaaatgacgaccaaaaccaccacaactacgatccttataataatttctcttcatcaacttctgttgattgcactctctcacttggaacaccctctactcgtctcgacgaccaccatagattttcttctgctaattctaacaacatctccggcgacttttatattcacggaggaaacgctaagacttcttcgtacaagaagggtggtgttgctcatagcctacctcgccgttgtgctagctgcgacaccacttcaactcctctatggagaaacggaccaaaaggacctaagtcgttatgtaacgcgtgtggaatccgattcaagaaagaggagaggcgtgcgacggccagaaacttaacgatctccggtggaggttcatcagcggcagaagtcccagtagagaattcgtacaacggaggtggaaactattacagtcatcatcatcatcactatgcctcgtcgtcgccgtcgtgggctcatcagaacacacaaagagttccatatttctcaccggttccggagatggaatatccctacgtggataacgtcacggcttcttcttttatgtcttggaattga

SEQ ID NO: 617 - protein, 208 aa, Arabidopsis thaliana
MMGYQTNSNFSMFFSSENDDQNHHNYDPYNNFSSSTSVDCTLSLGTPSTRLDDHHRFSSANSNNISGDFYIHGGNAKTSSYKKGGVAHSLPRRCASCDTTSTPLWRNGPKGPKSLCNACGIRFKKEERRATARNLTISGGGSSAAEVPVENSYNGGGNYYSHHHHHYASSSPSWAHQNTQRVPYFSPVPEMEYPYVDNVTASSFMSWN

SEQ ID NO: 618 - DNA, 927 bp, Arabidopsis thaliana
atgcaagtgtttcaaaggaaagaagattcatcttggggaaactcaatgcctacaacaaattcaaatattcaaggatctgaatctttcagcttgactaaggatatgataatgtctacaacacaattacccgcgatgaaacattcgggtttgcagctgcaaaatcaagattcaacctcatcacaatctactgaagaagaatcaggcggcggtgaagttgcaagctttggagaatataagcgttatggatgcagcattgttaataacaatctctcaggttacatcgaaaacttgggaaagcctattgaaaattatactaagtcaattactacctcgtcgatggtgtctcaagactctgtgtttcctgctcctacttctggtcaaatatcttggtctcttcaatgtgctgaaacgtcacatttcaatggtttcttggctcctgaatatgcatcaacaccaacggcgctgccacatttagagatgatgggtttggtttcttcaagagtgccattgcctcatcacattcaagagaatgaaccaatatttgtcaatgcgaaacagtatcatgcgattctccgtcgcaggaagcaccgtgctaaactcgaagctcagaacaaactcatcaaatgccgtaaaccgtaccttcatgagtctcgccatcttcatgctttaaagagagctagaggctccggtggacgtttcctcaatacaaagaagcttcaagaatcatcaaactcactgtgttcttctcaaatggcaaatggacaaaatttctctatgagccctcacggtggtggaagcggaatcgggtctagttcgatctcaccgagctccaattcaaactgtatcaacatgttccaaaacccgcagttcagattctcaggttatccgtcaacacaccatgcctcagctctcatgtcagggacttga

SEQ ID NO: 619 - protein, 308 aa, Arabidopsis thaliana
MQVFQRKEDSSWGNSMPTTNSNIQGSESFSLTKDMIMSTTQLPAMKHSGLQLQNQDSTSSQSTEEESGGGEVASFGEYKRYGCSIVNNNLSGYIENLGKPIENYTKSITTSSMVSQDSVFPAPTSGQISWSLQCAETSHFNGFLAPEYASTPTALPHLEMMGLVSSRVPLPHHIQENEPIFVNAKQYHAILRRRKHRAKLEAQNKLIKCRKPYLHESRHLHALKRARGSGGRFLNTKKLQESSNSLCSSQMANGQNFSMSPHGGGSGIGSSSISPSSNSNCINMFQNPQFRFSGYPSTHHASALMSGT

SEQ ID NO: 620 - DNA, 1170 bp, Arabidopsis thaliana
atgatcgtgtacggtgggggagcatccgaggacggtgaaggtggaggggtggttctgaagaaagggccatggacggtggccgaggacgagacactggcggcttacgtacgggaatacggtgaagggaactggaattctgttcagaagaagacatggctggctaggtgtggcaagagctgccgcctccgctgggctaaccacttacgacctaatctcaggaaaggctccttcacccccgaggaagaacgtctcatcatacaactccactctcagctaggcaacaaatgggctcgcatggctgctcagttaccaggcagaacagataacgagatcaagaactactggaacacgaggttgaaacgcttccaacgccaaggcctccctctctaccctccagaatattcccaaaacaatcatcaacaacaaatgtatcctcaacagccctcctcacctctcccgtcccaaacacctgcttcttcctttacctttcctctcctccaaccgccttctctgtgtcccaaacgttgttataacactgccttctctcccaaggcctcatatatttcttctccaaccaatttccttgtctcgtctccgacctttcttcacacccattcctctctttcctcctatcagtctaccaatccggtttactccatgaaacatgagctctcttcaaaccaaattccatactctgcctctttaggagtctatcaagtaagcaagttctcagacaatggggattgtaaccaaaacctgaacaccggtttgcatacaaatacctgtcagctgttagaggatcttatggaggaggccgaggctctagctgatagctttcgtgctcctaagcggagacaaatcatggctgcgcttgaggacaacaacaacaacaacaactttttctcgggaggtttcggacatcgtgtttcttccaacagtctatgttccttgcaaggtttaacaccaaaggaagatgagtctctccagatgaacacaatgcaagatgaggacataacaaagcttcttgactggggaagtgaaagtgaagaaatctcaaacgggcaatcctctgtgataacaacagagaacaaccttgtccttgacgatcaccagttcgcttttctgtttccagttgatgatgacaccaacaacttgccagggatctgctag

SEQ ID NO: 621 - protein, 389 aa, Arabidopsis thaliana
MIVYGGGASEDGEGGGVVLKKGPWTVAEDETLAAYVREYGEGNWNSVQKKTWLARCGKSCRLRWANHLRPNLRKGSFTPEEERLIIQLHSQLGNKWARMAAQLPGRTDNEIKNYWNTRLKRFQRQGLPLYPPEYSQNNHQQQMYPQQPSSPLPSQTPASSFTFPLLQPPSLCPKRCYNTAFSPKASYISSPTNFLVSSPTFLHTHSSLSSYQSTNPVYSMKHELSSNQIPYSASLGVYQVSKFSDNGDCNQNLNTGLHTNTCQLLEDLMEEAEALADSFRAPKRRQIMAALEDNNNNNNFFSGGFGHRVSSNSLCSLQGLTPKEDESLQMNTMQDEDITKLLDWGSESEEISNGQSSVITTENNLVLDDHQFAFLFPVDDDTNNLPGIC

SEQ ID NO: 622 - DNA, 1484 bp, Arabidopsis thaliana
gaaaaagacttcactttttttttttactaattaattagtttttttttctcctttccaaaacaatggagaatttcgtcgacgagaatggttttgcttctctaaaccaaaacatcttcacacgtgatcaagaacacatgaaagaagaagattttccattcgaagtcgtcgaccaatcaaaacctacaagctttcttcaagattttcaccatcttgatcatgatcatcagtttgatcatcatcatcatcatggctcctcatcttcacatcctttgctcagcgtccaaactacgtcttcttgtatcaataatgctcctttcgagcattgctcttaccaagaaaacatggtcgatttctatgaaactaaaccaaatttgatgaatcatcatcatttccaagcagtggaaaactcatacttcactcgtaatcatcatcatcatcaagagatcaatttggtcgatgaacatgatgatcctatggacttggagcaaaacaacatgatgatgatgaggatgatcccttttgattaccctcctacagagactttcaaacctatgaacttcgtaatgccagatgaaatttcatgtgtttctgcagataatgattgttatagagcaacgagtttcaacaagaccaaaccatttcttacacgaaagttgtcttcttcttcttcatcatcatcatggaaagaaaccaaaaagtcaaccttagtcaaaggacaatggactgctgaagaagacagggtactgattcaactcgtggagaagtatggattgcgtaaatggtcgcatatcgctcaagtgttaccgggaagaatcgggaaacaatgtagagagaggtggcataaccatttgagacctgacattaagaaagaaacatggagtgaagaagaggacagagtgttgatagaatttcacaaagagattggaaacaaatgggcagagattgcgaaaagactcccgggaagaacagagaactcgatcaagaaccattggaacgcaacaaaaagaagacaattctctaaaagaaaatgtagatctaagtatccaagaccttctctgttgcaggattacatcaagagcttgaatatgggagctttgatggcttcttctgttcctgcaagaggtagacgcagagagagtaataacaagaagaaggatgttgttgttgcggttgaggagaagaagaaggaagaggaggtgtatggacaagacaggattgtgcctgaatgtgtgtttactgatgattttggattcaatgagaagctgcttgaggaaggatgtagcattgactctttgcttgatgacattcctcagcctgacattgatgcttttgttcatgggctctgatttgtattttttattctgcttgtttcagttttgttgttttttgtttgtctttttatacgagacagattccaccaaacttcaataatttgaaaagatataaaatattttgctttttaaaaaaaaaaaaaaaaaaaaaaa

SEQ ID NO: 623 - protein, 427 aa, Arabidopsis thaliana
MENFVDENGFASLNQNIFTRDQEHMKEEDFPFEVVDQSKPTSFLQDFHHLDHDHQFDHHHHHGSSSSHPLLSVQTTSSCINNAPFEHCSYQENMVDFYETKPNLMNHHHFQAVENSYFTRNHHHHQEINLVDEHDDPMDLEQNNMMMMRMIPFDYPPTETFKPMNFVMPDEISCVSADNDCYRATSFNKTKPFLTRKLSSSSSSSSWKETKKSTLVKGQWTAEEDRVLIQLVEKYGLRKWSHIAQVLPGRIGKQCRERWHNHLRPDIKKETWSEEEDRVLIEFHKEIGNKWAEIAKRLPGRTENSIKNHWNATKRRQFSKRKCRSKYPRPSLLQDYIKSLNMGALMASSVPARGRRRESNNKKKDVVVAVEEKKKEEEVYGQDRIVPECVFTDDFGFNEKLLEEGCSIDSLLDDIPQPDIDAFVHGL

SEQ ID NO: 624 - DNA, 549 bp, Arabidopsis thaliana; identical to SEQ ID NO: 13

SEQ ID NO: 625 - protein, 139 aa, Arabidopsis thaliana; identical to SEQ ID NO: 14

SEQ ID NO: 626 - DNA, 696 bp, Arabidopsis thaliana; identical to SEQ ID NO: 39

SEQ ID NO: 627 - protein, 139 aa, Arabidopsis thaliana; identical to SEQ ID NO: 40

SEQ ID NO: 628 - DNA, 450 bp, Arabidopsis thaliana; identical to SEQ ID NO: 11

SEQ ID NO: 629 - protein, 131 aa, Arabidopsis thaliana; identical to SEQ ID NO: 12

SEQ ID NO: 630 - DNA, 1265 bp, Arabidopsis thaliana
ggaaactatcaaccaccaaaatctttcacattacaccttccttttgtcctcaaaccaaaaccctagaaaccaaaaatggaaaaagccttgagaaacttcaccgaatctacccactcaccagaccctaatcctctcacaaaattcttcactgaacctacagcctcacctgttagccgcaaccgcaaactgtcttcaaaagataccactgtaaccatcgccggagctggcagcagcacgacgaggtaccgcggcgtacgccggaggccgtggggacgatacgcggcggagatacgtgacccaatgtcgaaggagagacgttggctcggaacatttgacacggcggaacaagccgcttgtgcttacgactctgcggctcgtgcctttcgtggagcaaaggctcgtactaattttacttatccgacagctgtcattatgcctgaaccaaggttttctttttccaacaagaaatcttcgccgtctgctcgttgtcctcttccttctctaccgttagattcctctacccaaaacttttacggtgcaccggcagcgcagaggatctataatacacagtctatcttcttacgcgacgcctcgtgttcctctcgtaaaacgactccctataataactctttcaacggctcatcatcttcttactcagcatcgaaaacggcatgcgtttcttattccgaaaacgaaaacaacgagtcgtttttcccggaagaatcttctgatactggtctattacaagaggtcgttcaagagttcttgaagaaaaatcgcggcgttcctccttctccaccaacaccaccgccggtgactagccatcatgacaactctggttatttctctgctctcactatatactctgaaaatatggttcaagagactaaggagactttgtcgtcgaaactagatcgctacgggaattttcaagctaatgacgacggcgtaagagccgtcgcagacggtggtttatctttgggatcaaacgagtgggggtatcaagaaatgttgatgtacggaactcagttaggctgtacttgccgaagatcgtggggatagctagatattcatcatgattatgttttgagttttggtactatcgacttagtttaaagttgctacctttcccaatgttggatattaactaaattatgttttaagttgaatttgctaataggatttcataattataatcaagtttataatatattttagtagctaattaaagtttatatccacgtattctgaaaaaaaaaaaaaaa

SEQ ID NO: 631 - protein, 328 aa, Arabidopsis thaliana
MEKALRNFTESTHSPDPNPLTKFFTEPTASPVSRNRKLSSKDTTVTIAGAGSSTTRYRGVRRRPWGRYAAEIRDPMSKERRWLGTFDTAEQAACAYDSAARAFRGAKARTNFTYPTAVIMPEPRFSFSNKKSSPSARCPLPSLPLDSSTQNFYGAPAAQRIYNTQSIFLRDASCSSRKTTPYNNSFNGSSSSYSASKTACVSYSENENNESFFPEESSDTGLLQEVVQEFLKKNRGVPPSPPTPPPVTSHHDNSGYFSALTIYSENMVQETKETLSSKLDRYGNFQANDDGVRAVADGGLSLGSNEWGYQEMLMYGTQLGCTCRRSWG

SEQ ID NO: 632 - DNA, 833 bp, Arabidopsis thaliana
atggtgagagggaagatcgagatcaagaagattgagaacgtgacgagcagacaagtcacgttctcgaagcgaagaagcggtctatttaagaaggctcatgagctttcggttctatgcgatgctcaagtagccgccattgtcttttctcagagcggaagattacacgaatactctagctcccagatggagaagattatagatagatatggcaagtttagtaatgccttctatgtggcagagaggcctcaagtagaacgatacttgcaggagctgaagatggaaattgatagaatggtgaaaaagattgatctccttgaagttcatcaccgtaagctgttggggcaaggtttggattcgtgttcagtgacagaacttcaagagattgacactcaaattgagaaaagccttcgtattgtcaggtcaagaaaggctgagttatatgcagatcaactgaaaaagctaaaagaaaaggagagggagctcttgaacgagagaaaaaggctgcttgaagagcaaaatagagaaaggttgatgcgaccggtggtgccagcaactttacaaatatgtgataagggtaatactgaaggtggtcacagaaccaaacattcatcagaggttgaaaccgacctatttatcggattgcccgtgactcggctataacatattactttggttccatgtttgtacactataatgcttccatacagtttatagttttctgagtgctcatgcatgaccatctcttcatatatatatgtgtataaactgaaaataatttgacatgtattatttgtcactttagtttttcttttgaatgaatgtgacattttgtt

SEQ ID NO: 633 - protein, 219 aa, Arabidopsis thaliana
MVRGKIEIKKIENVTSRQVTFSKRRSGLFKKAHELSVLCDAQVAAIVFSQSGRLHEYSSSQMEKIIDRYGKFSNAFYVAERPQVERYLQELKMEIDRMVKKIDLLEVHHRKLLGQGLDSCSVTELQEIDTQIEKSLRIVRSRKAELYADQLKKLKEKERELLNERKRLLEEQNRERLMRPVVPATLQICDKGNTEGGHRTKHSSEVETDLFIGLPVTRL

SEQ ID NO: 634 - DNA, 1107 bp, Arabidopsis thaliana
ccattatcatatcctcttcttccttcttcactatcaatcttcttctccactacaacacaaatggagaaatcatcctcaatgaaacaatggaagaagggtcctgctcggggtaaaggcggtccacaaaacgctctttgtcagtaccgtggagtcaggcaaaggacttggggcaaatgggtggctgagatcagagagcccaagaagagggcaagactttggcttggctctttcgctacagctgaagaagcagctatggcttatgatgaggctgccttgaaactctatgggcacgacgcatacctcaacttacctcatcttcagcggaatacaagaccttctctgagtaactctcagaggttcaaatgggtaccttcaaggaagtttatatctatgtttccttcatgtggtatgctaaacgtgaatgctcagcctagtgttcacataatccagcaaagactagaagaactcaagaaaactggacttttatctcaatcctattcttctagttcttcctccaccgaatcaaaaactaatactagctttcttgatgagaagaccagcaagggagaaacagacaatatgttcgaaggtggtgatcagaagaaaccagagatcgacctgaccgagtttcttcagcaactaggaatcttgaaggatgaaaatgaagcagaaccaagtgaggtagcagagtgtcattcccctccaccatggaacgagcaagaagaaactggaagtcctttcagaactgagaatttcagctgggataccctgatcgagatgccaagaagtgaaaccacaactatgcaatttgactccagcaacttcggaagctatgattttgaggatgatgtatccttcccttccatctgggactactacggaagcttagattgagtaaaagcaatttaaggtagatcaagattcagaagtacacaaatggttttggatttagtgtagcgttttggaaaagagacataggtagtgagagtgcagtcttttattatgcagcaataaagtgagtcagtgtacaaccgagttgttcgctttttttggtatattaatgaagcatgttcattttttcgctaaaaaaaaaaaaaaaaaaaaaaa

SEQ ID NO: 635 - protein, 277 aa, Arabidopsis thaliana
MEKSSSMKQWKKGPARGKGGPQNALCQYRGVRQRTWGKWVAEIREPKKRARLWLGSFATAEEAAMAYDEAALKLYGHDAYLNLPHLQRNTRPSLSNSQRFKWVPSRKFISMFPSCGMLNVNAQPSVHIIQQRLEELKKTGLLSQSYSSSSSSTESKTNTSFLDEKTSKGETDNMFEGGDQKKPEIDLTEFLQQLGILKDENEAEPSEVAECHSPPPWNEQEETGSPFRTENFSWDTLIEMPRSETTTMQFDSSNFGSYDFEDDVSFPSIWDYYGSLD

SEQ ID NO: 636 - DNA, 1356 bp, Arabidopsis thaliana
atgcagagcagcttcaaaaccgttcctttcactcctgatttctactctcaatcctcttacttcttcagaggagatagttgtcttgaggagtttcatcaaccagtcaatggttttcaccatgaagaagctatcgatttaagtccaaatgtcactattgcttcagctaacttacactacacgacgtttgatacggttatggattgtggtggtggtggtggtggcttgagggagagacttgaaggaggagaagaggagtgtttggacacagggcaattagtgtaccagaaagggacaagattagtaggaggaggagtaggagaagtgaacagcagttggtgtgattcggtttcagctatggctgataacagtcaacatactgacacttccacagatattgatactgatgacaagactcagttgaatggaggtcatcaagggatgctattggctacaaattgttcagatcaatccaatgtgaaatctagtgatcaaaggacacttcgtcgacttgctcagaaccgggaggctgctaggaaaagtcggttgaggaaaaaggcctatgttcagcaacttgagaatagtcgaatcaggcttgcacagctagaggaagagctcaaaagagctcgccaacagggatctttggttgaaagaggagtttcagcggatcacacgcatttggcagcaggaaatggtgtcttttcatttgaattggaatatacacgttggaaggaggaacatcaaagaatgatcaacgacttaagatcgggtgtgaattcgcagttaggtgacaacgatctacgcgttctagtggatgctgtgatgagtcactatgatgaaatattcaggctaaagggaattggcactaaagttgaagtctttcatatgctctcaggcatgtggaagacacctgccgagagatttttcatgtggttaggtggatttagatcatcagagttacttaagatattggggaaccatgtggatccattgacggaccagcagttgataggcatttgcaaccttcagcaatcgtctcaacaagcagaggatgcattgtcacaaggcatggaagctctacaacaatcacttctcgagacgctttcttctgcttctatgggtccaaactcttcagcaaatgttgcagattatatgggtcatatggctatggctatgggcaaacttggcactcttgaaaacttccttcgccaggctgatttattgaggcaacaaactctgcaacagcttcacagaattctcaccacacgacaagctgctcgcgcctttttggtcatccacgattatatttctcggcttagagcacttagctctctatggttagccagacctagagactaa

SEQ ID NO: 637 - protein, 451 aa, Arabidopsis thaliana
MQSSFKTVPFTPDFYSQSSYFFRGDSCLEEFHQPVNGFHHEEAIDLSPNVTIASANLHYTTFDTVMDCGGGGGGLRERLEGGEEECLDTGQLVYQKGTRLVGGGVGEVNSSWCDSVSAMADNSQHTDTSTDIDTDDKTQLNGGHQGMLLATNCSDQSNVKSSDQRTLRRLAQNREAARKSRLRKKAYVQQLENSRIRLAQLEEELKRARQQGSLVERGVSADHTHLAAGNGVFSFELEYTRWKEEHQRMINDLRSGVNSQLGDNDLRVLVDAVMSHYDEIFRLKGIGTKVEVFHMLSGMWKTPAERFFMWLGGFRSSELLKILGNHVDPLTDQQLIGICNLQQSSQQAEDALSQGMEALQQSLLETLSSASMGPNSSANVADYMGHMAMAMGKLGTLENFLRQADLLRQQTLQQLHRILTTRQAARAFLVIHDYISRLRALSSLWLARPRD

SEQ ID NO: 638 - DNA, 977 bp, Arabidopsis thaliana
aattcttcccttttccccttctaatttctctcatctctctattagaaaaattattagcaattatgttgtccactgcaccggccttttcattctccgaaccgggtttggttaatcaattctcgggtttccaaaccgggttcactccttgggaatgggattgctctgatctctttttcgtggaccaaatgtctcttgaaccggccatccctagtccttgttatggtgaatccgacactggttccgtcaaaattaattccggttctcatgacatgaaaaccggttctgacgaatcttgtgccggtttcgtcaaaattaatcctcgttgtgacgacgccgacatatcaaacgatctaccgtgctctcaagcagatgaaccggactcggacgacacaaaacaattgacagccatcacaaatttcggttcgggagagaataaccataaccggaaaaaaatgatccaaccggagatgaccgacgagcggaagaggaagaggatggagtcaaaccgggaatcagcgaaacggtcaagaatgcgtaaacaaagtcacattgataacttacgagagcaagtaaaccggttggatttagaaaaccgtgagctcgggaaccgactccggttagttttacaccagcttcaacgagtgaattccgacaataaccggctcgtgacagaacaagagatactccggctaagattgtcggagatgcgtcggattctgatcattagacaacttcaacaacagcaacaatgggaactacataaccggagaatgatcatgactgaacaaaaccaccctcatcttcaatgatagatcaaaatatttaagaagaaaaaatatcgaaaaacttagaacaataaccaaaaaaaaaaagcaaagcaaaaaagaaactctcgctatgtctctctatctctctatgtaaatgaaatgaaggttaggaagagaaaatgatagttttctaattttcctttccacttt

SEQ ID NO: 639 - protein, 248 aa, Arabidopsis thaliana
MLSTAPAFSFSEPGLVNQFSGFQTGFTPWEWDCSDLFFVDQMSLEPAIPSPCYGESDTGSVKINSGSHDMKTGSDESCAGFVKINPRCDDADISNDLPCSQADEPDSDDTKQLTAITNFGSGENNHNRKKMIQPEMTDERKRKRMESNRESAKRSRMRKQSHIDNLREQVNRLDLENRELGNRLRLVLHQLQRVNSDNNRLVTEQEILRLRLSEMRRILIIRQLQQQQQWELHNRRMIMTEQNHPHLQ

SEQ ID NO: 640 - DNA, 1087 bp, Arabidopsis thaliana
aaaggagcattggtatctcaaacaatatttgccctttctctatctctctctcatcactatttgccatctctttctctctccctctctttcaaatgtcaataaaccaatactcaagcgatttccactaccattctctcatgtggcaacaacagcagcaacaacaacaacaccaaaacgacgtcgtggaagaaaaagaagctcttttcgagaaacccttaaccccaagtgacgtcggaaaactcaaccgcctcgtcatcccaaaacagcacgccgagagatacttcccactagcggccgccgccgcagacgccgtggagaaaggacttctcctctgctttgaggacgaggaaggtaaaccatggagattcagatactcgtactggaacagtagccagagttatgtcttgaccaaaggctggagcagatacgtcaaggagaagcaccttgacgccggagacgtcgttctcttccatcgacaccgttcagacggcggaagattcttcattggctggagaagacgcggtgactcttcttcctcctccgactcttatcgccatgttcaatccaatgcctcgctccaatattatcctcatgcaggggctcaagcggtggagagccaaagaggcaactcgaagacattaagactgttcggagtgaacatggagtgccagctagattcggactggtccgagccatccacacctgacggttctaacacatatacaaccaatcacgaccagtttcatttctaccctcaacaacaacactatcctcctccgtactacatggacataagtttcacaggagatatgaaccggacgagctagaagcccacaaggattaaaaaaaagcttcacatctggtcctgttatgttgtcatagatgttgattccttaattttacacaagcttcattttgcattatttaaagtaaaatcgtattttgattcttctttaaatctctctcaattttcactctcttcctttttcttcttatgtattagattcttttacatagctaacacttgtatagagaattcaaagttctggctattttcgaaagttatcttttctcttaaaaaaaaaaa

SEQ ID NO: 641 - protein, 244 aa, Arabidopsis thaliana
MSINQYSSDFHYHSLMWQQQQQQQQHQNDVVEEKEALFEKPLTPSDVGKLNRLVIPKQHAERYFPLAAAAADAVEKGLLLCFEDEEGKPWRFRYSYWNSSQSYVLTKGWSRYVKEKHLDAGDVVLFHRHRSDGGRFFIGWRRRGDSSSSSDSYRHVQSNASLQYYPHAGAQAVESQRGNSKTLRLFGVNMECQLDSDWSEPSTPDGSNTYTTNHDQFHFYPQQQHYPPPYYMDISFTGDMNRTS

SEQ ID NO: 642 - DNA, 1376 bp, Arabidopsis thaliana
tgtttgatctttgtccagagaactccaagatagaccaaaaaggttcaacctcaaaacaaacaacacaaaaacagccaaatagctagagaccaagatgagatcaagcagccaaaattctgaaaactccaagacttgtctatctaacaacatcaaagcaaccaccaagaatgaagaagataaagatgaagaggatgatgaagaaggcgaagaggatgaagaagagagatctggagatcagagcccatctagcaatagctatgaggaagagagtgggagtcaccaccatgatcagaacaagaagaatggaggatccgtgaggccgtacaaccgctcaaagactccgaggctgcgatggacgccggagctccatatttgctttcttcaagctgtggagagattgggtggcccagatagagcaacaccgaagcttgttctccaattgatgaacgtcaaggggctaagtattgcccatgttaagagtcatcttcagatgtacagaagcaagaagaccgatgagcctaatgaaggagatcaaggattttcgtttgaacacggagctggttacacttacaaccttagccaacttccaatgctacaaagttttgatcaaaggccttcttctagtttaggatatggtggtggttcgtggactgaccacagacgacagatctaccgtagcccttggagaggattaacgacacgagaaaatacaagaacaagacaaacaatgtttagctcacagcctggtgagagatatcacggagttagcaatagtattcttaacgataagaacaaaactatttcatttcgaatcaattctcatgaaggggttcatgataacaatggagtagctggagctgttccaagaattcatagaagttttcttgaaggtatgaaaacgtttaacaaatcatggggacagagcctctcttccaatcttaagtcctccaccgcaacaataccacaagatcatattgctacaacgctaaattcttatcaatgggagaatgctggagtggcagaaggatcagagaatgttttgaagaggaagaggttattattttctgatgactgcaataagtcagaccaagatttggatctaagcttgtcccttaaggtacctcggacacacgacaatcttggagaatgcttgttagaagatgaagtaaaagaacatgatgatcatcaagatatcaagagtttgtctctttcgttatcatcttcaggttcatcaaaactcgaccgaaccattaggaaagaagatcaaactgatcacaaaaagagaaagatttcggtcttggcaagtccccttgatctcactctgtgaatatgtataacaacttatatacgtatattctaagtgagatcttgtggta

SEQ ID NO: 643 - protein, 410 aa, Arabidopsis thaliana
MRSSSQNSENSKTCLSNNIKATTKNEEDKDEEDDEEGEEDEEERSGDQSPSSNSYEEESGSHHHDQNKKNGGSVRPYNRSKTPRLRWTPELHICFLQAVERLGGPDRATPKLVLQLMNVKGLSIAHVKSHLQMYRSKKTDEPNEGDQGFSFEHGAGYTYNLSQLPMLQSFDQRPSSSLGYGGGSWTDHRRQIYRSPWRGLTTRENTRTRQTMFSSQPGERYHGVSNSILNDKNKTISFRINSHEGVHDNNGVAGAVPRIHRSFLEGMKTFNKSWGQSLSSNLKSSTATIPQDHIATTLNSYQWENAGVAEGSENVLKRKRLLFSDDCNKSDQDLDLSLSLKVPRTHDNLGECLLEDEVKEHDDHQDIKSLSLSLSSSGSSKLDRTIRKEDQTDHKKRKISVLASPLDLTL

SEQ ID NO: 644 - DNA, 837 bp, Arabidopsis thaliana
agtaagagactcaataataatgtcgaacacttcaaactccgatcccaattccgatatcccatttgcttcctccaatgtaactcttcctagttacaatcaaaacccaagaagaaaacgtactaaactcaccaacaacgaagtcggttcttcttcgtcttctccaaggcctaaaccggtcacgcaaccggaccctgatgcttcacaaatcgcacgaccatgtactgaatgtggtaaacaattcgggtcactgaaggcactctttggacacatgagatgtcaccctgaacgtcagtggcgtggcatcaaccctccttctaacttcaaacgtaggatcaactcaaacgctgcgtcatcatcctcgagttgggatccatctgaggaagagcataacatagcctcctgtttactaatgatggctaatggtgatgtcccaacccgttcaagtgaagttgaggaacggtttgagtgtgatggttgtaagaaagtgtttgggtcacatcaagcgttaggcggacatagagcaacacataaagacgtcaaaggatgtttcgccaataaaaacataaccgaagatcctcctcctccacctcctcaagagatcgttgatcaagataagggcaagagtgtgaagttggtctcggggatgaatcatcgatgtaacatctgttctagagtgttctccagtggtcaagcgttaggaggtcacatgagatgtcattgggagaaagatcaggaagagaaccaagtcaggggcattgatcttaatgttcctgcggcgacatcttcagacacaacgttaggttgttccttggatcttaggttaggactttgatatat

SEQ ID NO: 645 - protein, 270 aa, Arabidopsis thaliana
MSNTSNSDPNSDIPFASSNVTLPSYNQNPRRKRTKLTNNEVGSSSSSPRPKPVTQPDPDASQIARPCTECGKQFGSLKALFGHMRCHPERQWRGINPPSNFKRRINSNAASSSSSWDPSEEEHNIASCLLMMANGDVPTRSSEVEERFECDGCKKVFGSHQALGGHRATHKDVKGCFANKNITEDPPPPPPQEIVDQDKGKSVKLVSGMNHRCNICSRVFSSGQALGGHMRCHWEKDQEENQVRGIDLNVPAATSSDTTLGCSLDLRLGL

SEQ ID NO: 646 - DNA, 969 bp, Arabidopsis thaliana
atgattggaacaagcttccccgaggatcttgattgtggcaacttctttgacaacatggatgatctcatggactttcccggtggagatatcgatgtcggtttcggcataggtgactccgactctttccctaccatctggaccactcatcacgacacgtggcctgccgcttctgatcctctcttctcttccaacaccaactctgattcatcacctgagctctatgttccgtttgaggacattgttaaggtggaaagacctccaagctttgtagaggaaacattggttgagaagaaggaagattcgttttcgacaaacactgattcatcatcttctcatagccaattcaggagctcaagtccagtgtcggttctcgagagcagctcctcctcgtctcaaaccaccaacacaacctcccttgttctccctggaaagcacggtcgtccacgcacaaaacgccctcgtccacctgtccaggataaagatagagtcaaagacaatgtgtgcggtggtgactcgcgcctcatcattagaataccgaaacagtttctctctgatcacaacaagatgatcaacaagaagaagaagaagaaggccaagattacttcttcctcttcttcgtccgggattgatcttgaagtcaatggaaacaacgtcgattcgtattcttcagagcaatatccgcttaggaaatgtatgcactgtgaggtcaccaagactccacagtggaggcttggtccaatgggtccaaagacactttgcaatgcgtgcggtgtacgttacaaatcagggaggcttttcccggagtaccgtccagctgctagtccaacatttactccagctcttcactcaaactcacacaagaaagtggctgaaatgagaaacaagagatgcagtgatggtagctacataaccgaagagaatgatctgcaagggctgattccgaacaatgcctacattggcgtagactaa

SEQ ID NO: 647 - protein, 322 aa, Arabidopsis thaliana
MIGTSFPEDLDCGNFFDNMDDLMDFPGGDIDVGFGIGDSDSFPTIWTTHHDTWPAASDPLFSSNTNSDSSPELYVPFEDIVKVERPPSFVEETLVEKKEDSFSTNTDSSSSHSQFRSSSPVSVLESSSSSSQTTNTTSLVLPGKHGRPRTKRPRPPVQDKDRVKDNVCGGDSRLIIRIPKQFLSDHNKMINKKKKKKAKITSSSSSSGIDLEVNGNNVDSYSSEQYPLRKCMHCEVTKTPQWRLGPMGPKTLCNACGVRYKSGRLFPEYRPAASPTFTPALHSNSHKKVAEMRNKRCSDGSYITEENDLQGLIPNNAYIGVD

SEQ ID NO: 648 - DNA, 1941 bp, Arabidopsis thaliana
ttccttggcattctctttagaactttcgtacaaaatgcaaaacctgaacctctaaagctaaaaaaaaagattagagactgtaactgcttttatcagattttcaactaggaaaaaagttacaatcttttttgatggctcctccaatgacgaattgcttaacgttttctctgtcaccaatggagatgttgaaatcaactgatcagtctcacttctcttcttcttacgacgattcttctactccttatctcatcgataacttctatgctttcaaagaagaagctgagatagaagctgctgctgcttcaatggcggattcaacaaccttatctacttttttcgatcattctcagactcagattccaaagctggaagatttcctcggtgattcctttgtccgttactctgataaccaaacagagacccaagactcttcttctctcactccattctacgatccacgtcaccgcaccgttgccgaaggagttacagggttcttctctgatcatcatcagccagatttcaagacgataaactcgggaccagaaatcttcgatgactcaacaacttccaacatcggtggtactcatctctccagtcacgtggtggagtcatcaacgacggcgaagttagggtttaacggtgattgcaccaccaccggaggagttttgtctctaggggttaacaacacatcagatcaacctttgagctgtaacaatggcgagagaggtggaaacagtaacaagaagaaaacagtttctaagaaggaaacatcagatgattcaaagaagaagattgtcgaaacattgggacaaagaacttcaatttatcgtggagtcacccgacatagatggactggaagatacgaagcgcatctatgggataacagctgtaggagggaaggtcaagccagaaaaggacgtcaagtgtacttaggtggatatgacaaggaagatagagcagctagagcctatgacttggcagctttaaaatactggggttctactgctactacaaattttccggtctcgagttattcaaaagaacttgaggaaatgaatcacatgaccaagcaagagtttattgcatctcttaggaggaaaagtagcggtttttcgagaggagcttcaatatatagaggtgtcacaaggcatcatcaacaaggtcgctggcaagcaagaatcggccgtgtcgcaggaaacaaagatctttacctcggaacctttgcaaccgaagaggaagcagcagaggcttatgacattgcagccataaagttcagaggaatcaacgcagtaactaactttgagatgaacaggtatgacattgaagctgtcatgaatagttctttacctgtaggaggagcagctgcgaaacgccacaaactcaaactcgctcttgaatctccttcttcatcatcctctgaccataacctccaacaacaacagttgcttccgtcctcttctccctcggatcaaaaccctaactcaatcccatgtggcattccatttgagccttcagttctctattaccaccagaacttctttcagcattatcctttggtctctgactctacaattcaagctcctatgaaccaagctgagtttttcttgtggcctaaccagtcttactaaatcatttggttcgttcttgcttagacttctattcaccgcactaaccgatgacccgaggcttatcttcttgattctggctataaggatgaatctttcaagttccttttttaactgtaggctaagacagaagtagaggggagaaaagttgaagaatctgaaacttttggggtcaattttgtattaatgtttttcttttgtcaagggtggattatcggttttattacttattttttgaatgtaatcggcctataacggtataactctgtttccatttatgaatatttttctcaaattgaaaaaaaaaaaaaaaaaa

SEQ ID NO: 649 - protein, 498 aa, Arabidopsis thaliana
MAPPMTNCLTFSLSPMEMLKSTDQSHFSSSYDDSSTPYLIDNFYAFKEEAEIEAAAASMADSTTLSTFFDHSQTQIPKLEDFLGDSFVRYSDNQTETQDSSSLTPFYDPRHRTVAEGVTGFFSDHHQPDFKTINSGPEIFDDSTTSNIGGTHLSSHVVESSTTAKLGFNGDCTTTGGVLSLGVNNTSDQPLSCNNGERGGNSNKKKTVSKKETSDDSKKKIVETLGQRTSIYRGVTRHRWTGRYEAHLWDNSCRREGQARKGRQVYLGGYDKEDRAARAYDLAALKYWGSTATTNFPVSSYSKELEEMNHMTKQEFIASLRRKSSGFSRGASIYRGVTRHHQQGRWQARIGRVAGNKDLYLGTFATEEEAAEAYDIAAIKFRGINAVTNFEMNRYDIEAVMNSSLPVGGAAAKRHKLKLALESPSSSSSDHNLQQQQLLPSSSPSDQNPNSIPCGIPFEPSVLYYHQNFFQHYPLVSDSTIQAPMNQAEFFLWPNQSY

SEQ ID NO: 650 - DNA, 765 bp, Arabidopsis thaliana
atcacagttatgtttccattcattggctataaaaaccatgctcactcccttttgttcttcacaccatttgcaggaaaaaatgaatagttgtcagtctaatcccaccaaaatggataattcagaaaatgttctatttaatgatcaaaacgaaaatttcacacttgttgcaccacacccttcttcttcgtacttgacaagagatcaagagcacgagatcatggtctctgctctgcgacaagtgatatctaactccggagctgacgacgcgtcatcatcaaacttgatcatcacaagcgttccgcctccagacgctggcccttgtcctctctgtggcgtcgccggttgctacggctgcacattacaacggccgcaccgagaggtaaagaaggagaagaaatacaaaggagtaaggaaaaaaccatcgggtaaatgggcggcggagatatgggatccgagatcgaaatcaaggaggtggcttggaacgtttcttacggcggagatggcggcacaatcttacaatgatgcggcggctgagtatcgagcaagacgtggtaaaacaaacggagaaggaattaaacggcggtggagatgactgagaaggacatggtcggtgatcatacacggcgaggtggaaatgttatatttactattgaaaactaaattatttattatagagggagatattactctttacgctttcattaagatttatttttataagttttaaagtattttattgttataaaaaaaaaaaaaaaaaaaaaa

SEQ ID NO: 651 - protein, 184 aa, Arabidopsis thaliana
MLTPFCSSHHLQEKMNSCQSNPTKMDNSENVLFNDQNENFTLVAPHPSSSYLTRDQEHEIMVSALRQVISNSGADDASSSNLIITSVPPPDAGPCPLCGVAGCYGCTLQRPHREVKKEKKYKGVRKKPSGKWAAEIWDPRSKSRRWLGTFLTAEMAAQSYNDAAAEYRARRGKTNGEGIKRRWR

SEQ ID NO: 652 - DNA, 683 bp, Arabidopsis thaliana
acttttgatccttcgcattcactaaataagtacatattatcagtttgacaccaaaaaaatggattattcagaaaatgttcaaaacaaaaatttcacccctatttcacaacctcctaacttgacaagagaccaagaacatgctatcatggtttctactttgcgacaagtgatatccaacactggaggtgatacgtcatcatctcactacattgctgcaagtgaggctcttccaccttcggacgctggcccttgtcctctttgcggcgtcaccagttgctacgggtgcgcattcccacagcatgaagagattaagcaggagaagaagcataaaggagtgaggaagaagccatcaggaaaatggtcggcggaaatatgggatccgagtacaagaacaaggaggtggcttggaacgtttccgacggcagagatggcagcggatgcttacgatgaggcagcggctgcgcttgtcgaaaaaagatcagcgagacgtggctcaaagaagggagaaggaagcattcaccaagaagtcggcggcggagatgactgagaaattaagctatataactatatatcgttttatagggggaaaaatagatgttttgggagaaattaatacattacctagatgggttatatgttttacgagaaaccacttgcgtgtgttttttttttaataagaggtt

SEQ ID NO: 653 - protein, 162 aa, Arabidopsis thaliana
MDYSENVQNKNFTPISQPPNLTRDQEHAIMVSTLRQVISNTGGDTSSSHYIAASEALPPSDAGPCPLCGVTSCYGCAFPQHEEIKQEKKHKGVRKKPSGKWSAEIWDPSTRTRRWLGTFPTAEMAADAYDEAAAALVEKRSARRGSKKGEGSIHQEVGGGDD

SEQ ID NO: 654 - DNA, 818 bp, Arabidopsis thaliana
cagacatcacaatcaaattaggtcagaagaattagtcggagaaaacagccatgggaagaagaaaagtagagatcaaacgaattgagaacaaaagctctcgacaagttactttctgtaaacgacgaaatggtctcatggagaaagctcgtcaactctcaattctttgtgaatcctccgtcgctcttatcatcatctctgccaccggaagactctacagcttctcctcaggtgatagcatggccaagatcctcagtcgttatgaattagaacaggctgatgatcttaaaaccttggatctagaagaaaaaactcttaattatctttcgcacaaggagttgctagaaacaatccaatgcaagattgaagaagcgaaaagcgataatgtaagtatagattgtctaaagtccctggaagagcagctcaagactgctctgtctgtaactagagctaggaagacagaactaatgatggagcttgtgaagacccatcaagagaaggagaagctgctgagagaggagaaccagagtttgactaaccagcttataaagatggggaagatgaagaagtctgtggaagcagaggatgcaagagcaatgtcaccggaaagtagctctgacaacaagccaccggagactctcctgcttctcaagtaaccaccatcaccaacgactgattcgaaaaataaaaattgtaaaaattatgatttgtagttcataaggaaagctacatactgtatgttaaaaatcctcttcttccccctgctacggaaaagtcatccaaggagatgcatcaaataaagtaattgatttttattgtta

SEQ ID NO: 655 - protein, 200 aa, Arabidopsis thaliana
MGRRKVEIKRIENKSSRQVTFCKRRNGLMEKARQLSILCESSVALIIISATGRLYSFSSGDSMAKILSRYELEQADDLKTLDLEEKTLNYLSHKELLETIQCKIEEAKSDNVSIDCLKSLEEQLKTALSVTRARKTELMMELVKTHQEKEKLLREENQSLTNQLIKMGKMKKSVEAEDARAMSPESSSDNKPPETLLLLK

SEQ ID NO: 656 - DNA, 1226 bp, Arabidopsis thaliana
aagacataattttctctgttttcctagctctctcctctcaaattcttccattgctctctgttttggcaaatcgtgaactgccacgtctttaaggcatcagtgaagcaaagatggactttgacgaggagctaaatctttgtattacgaaaggtaaaaatgttgatcattcttttggaggagaagcttcttccacgtccccaagatctatgaagaaaatgaagagtcctagtcgtcctaaaccctatttccaatcctcttcttctccttattcgttagaggctttccctttttctctcgatccaacacttcagaatcagcaacaacaactcggatcatacgttccggtacttgagcaacgacaagacccgacaatgcaaggccagaagcaaatgatctcctttagtcctcaacaacaacaacagcagcagcagtatatggcccagtactggagtgacacattgaatctgagtccaagaggaagaatgatgatgatgatgagccaagaagctgttcaaccttacatcgcaacgaagctgtacagaggagtgagacaacgtcaatggggaaaatgggtcgcagagatccgtaagccacgaagcagggcacgtctttggcttggtacctttgatacagctgaagaagctgccatggcctacgaccgccaagccttcaaattacgaggccacagcgcaacactgaatttcccggagcattttgtgaataaggaaagcgagctgcatgattcaaactcgtcggatcagaaagaacctgaaacgccacagccaagcgaggttaacttggagagcaaggaactaccggtgattgatgttgggagagaggaaggtatggctgaggcatggtacaatgccattacatcgggatggggtcctgaaagtcctctttgggatgatttggatagttctcatcagttttcatcagaaagctcatcttcttctcctctctcttgtcctatgaggcctttcttttgaaaaagtttataaacccacattgtgttgtaggttatagtttagggttatgctcattggcatttggatggaggcaatttttgtgatctcccattccaccacatatcagtcattatatgtgtctaccttttctctgtatttctatcattatcattgtttttattatgtgtctgtatgtgtttccctattgctacatacatagatgtcctctttgttcaaaaaaaaaaaaaaaaaaaaaaa

SEQ ID NO: 657 - protein, 292 aa, Arabidopsis thaliana
MDFDEELNLCITKGKNVDHSFGGEASSTSPRSMKKMKSPSRPKPYFQSSSSPYSLEAFPFSLDPTLQNQQQQLGSYVPVLEQRQDPTMQGQKQMISFSPQQQQQQQQYMAQYWSDTLNLSPRGRMMMMMSQEAVQPYIATKLYRGVRQRQWGKWVAEIRKPRSRARLWLGTFDTAEEAAMAYDRQAFKLRGHSATLNFPEHFVNKESELHDSNSSDQKEPETPQPSEVNLESKELPVIDVGREEGMAEAWYNAITSGWGPESPLWDDLDSSHQFSSESSSSSPLSCPMRPFF

SEQ ID NO: 658 - DNA, 1160 bp, Arabidopsis thaliana
aatttcataaatcatagagagagagagagagagagagagagagtttggaaacattccaaaaccagaactcgatattatttcaccaaagaatgatagaaacaagaactatctttttataaaactctttacaccccaaaagaaaatgtctcactcgttttgccttataatatttctttcaacaacaacccaaatctacaaaaaatcccaataaaaaaaaacttcagtctgtttgacattttgtcgaacacttggacggcatcacaaaaagctctaaactttctgactaccaatggcggattcgtcttccgacaaggagaagaaggaaaataataagcagcccgtgtatcgtggagtccgtatgaggagctggggaaaatgggtatcggagattcgcgaaccgaggaagaaatcgagaatctggctcgggacttttccgacggcggagatggctatgcgtgctcacgacgtggcggctatgagtatcaaaggaacttcagccattctcaatttccctgagctctctaaacttcttccccgacccgtttcgctcagccctcgtgacgtcagagctgcggcgaccaaagctgctctcatggacttcgatacgacggcgtttcgttcggatactgagactagcgaaacgacgacgtcgaataaaatgtcagagagtagtgagagtaacgaaacggtgtcgttctcatcgtcgtcttggtcctctgttacgagcattgaggaaagtacagtctccgacgatcttgacgagatcgtaaagttaccgagtctaggaacgagcctaaacgagtcgaacgagttcgtgatatttgactcgttggaggatttggtgtacatgcctcggtggttaagcggtacggaagaagaagtttttacgtataataacaatgattcttcgttgaattactcatcagttttcgaatcttggaaacattttccctgagaaaagaaagaagccatattttctctctctttttcgccatttttggttttaagttttttgatgggattctctctgtttttgctatgcgtgagatatctctctttgtggaatagataacttttctgttgaaaatctcctaagtctgtgaaatgaacgacgatggaaatgtaagtgtgtatattagcccgaaataatgactgtatac

SEQ ID NO: 659 - protein, 221 aa, Arabidopsis thaliana
MADSSSDKEKKENNKQPVYRGVRMRSWGKWVSEIREPRKKSRIWLGTFPTAEMAMRAHDVAAMSIKGTSAILNFPELSKLLPRPVSLSPRDVRAAATKAALMDFDTTAFRSDTETSETTTSNKMSESSESNETVSFSSSSWSSVTSIEESTVSDDLDEIVKLPSLGTSLNESNEFVIFDSLEDLVYMPRWLSGTEEEVFTYNNNDSSLNYSSVFESWKHFP

SEQ ID NO: 660 - DNA, 1134 bp, Arabidopsis thaliana
atgccgggggaacaaaccggagaaactccgacggtggccggagttggcggcggtggagctggttgtagcgccgggaatagtggtggaagtagtggatgtggtgctggtggtggcggtggtggtagtggtggaggtggtggcggaggaggagattcacagaggtcaattccgacgccgtttttgacgaaaacgtatcagcttgtggaagatccggtttacgacgaattgatctcgtggaacgaagatggaaccacttttattgtgtggcgaccagctgaattcgctagagatcttcttcccaaatacttcaaacataataacttctcgagttttgttcgtcagctcaatacttacggatttcgaaaagtagttccagatcgttgggagttttctaatgattgttttaagagaggtgagaagattctgcttcgggatattcaacggcggaaaatctctcagcctgctatggccgcggctgctgcagcggcggcggcagccgtagcggcttcggctgttacagtagcagctgttcctgttgtagctcatattgtttctccatcgaactctggagaagaacaggttatatcgtctaattcttcgcctgcggctgctgctgctgctataggaggagtggttggtggtggttctttgcagaggacaacgagctgcaccactgcaccagagctggttgaggagaatgagcgattgaggaaagataatgagcgattgaggaaagagatgacaaagcttaaaggattgtatgcgaatatctacacattaatggcgaatttcacaccgggtcaagaagattgtgcgcatttgttacctgaagggaaacctttagatcttttaccggagagacaagagatgagtgaagccattatggcttctgaaatagagacagggattggtctgaaacttggtgaggatttgactccaaggttgtttggggtttctattggggtcaagcgagctagaagagaagaagaattgggtgctgcagaggaagaagatgatgatagacgagaagctgctgcccaagagggagaacaaagttctgatgttaaggcagagccaatggaggagaataactccggtaaccataatgggtcgtggcttgaactcggaaaatga

SEQ ID NO: 661 - protein, 377 aa, Arabidopsis thaliana
MPGEQTGETPTVAGVGGGGAGCSAGNSGGSSGCGAGGGGGGSGGGGGGGGDSQRSIPTPFLTKTYQLVEDPVYDELISWNEDGTTFIVWRPAEFARDLLPKYFKHNNFSSFVRQLNTYGFRKVVPDRWEFSNDCFKRGEKILLRDIQRRKISQPAMAAAAAAAAAAVAASAVTVAAVPVVAHIVSPSNSGEEQVISSNSSPAAAAAAIGGVVGGGSLQRTTSCTTAPELVEENERLRKDNERLRKEMTKLKGLYANIYTLMANFTPGQEDCAHLLPEGKPLDLLPERQEMSEAIMASEIETGIGLKLGEDLTPRLFGVSIGVKRARREEELGAAEEEDDDRREAAAQEGEQSSDVKAEPMEENNSGNHNGSWLELGK

SEQ ID NO: 662 - DNA, 1860 bp, Arabidopsis thaliana
atgagaggttcttggtacaagagtgtttcctctgtttttggtctcagaccacggatcagagggttgttattcttcattgttggtgttgtggctctagttactattttagcaccattgacatctaattcgtatgattcttcgtcaagttcgacacttgtgccgaacatttatagtaactataggaggataaaggagcaagctgctgttgattatcttgatctgaggtctctttctttaggggctagtttaaaagagtttcctttttgtggtaaagaaagagaaagttatgtgccttgttataacataactgggaatttgcttgctgggcttcaagagggtgaggagttagatcgacattgcgagtttgaaagagagaaggaaagatgtgtagttcgtcctccgagagattataaaataccacttaggtggccacttggtagagatatcatatggagtgggaacgtgaagattaccaaagaccagtttctttcttcaggaactgtgacaacgaggttaatgttgcttgaagagaatcaaataacctttcactcggaggacggcctggtctttgatggggtcaaagactatgctcgtcaaattgctgagatgataggtttaggaagtgatactgaatttgctcaagcgggtgtacggactgtgttagacattggttgcggatttggtagctttggtgctcatttagtgtctttgaagctgatgcctatatgtattgctgagtatgaggcaactgggagccaagttcagttagctctagagagaggccttcctgcaatgattggcaatttcttttcaaaacagcttccttatccagcactgtcttttgatatggtccattgtgctcaatgtggcactacttgggatatcaaagatgcaatgctacttttggaagtggatcgtgttctgaaacccgggggatactttgttttaacttctcccacaaacaaagcacagggaaacttaccagataccaagaaaacgagcatctcaacacgggtgaatgagttatctaagaaaatctgttggagtctaacagctcagcaggatgagacgtttctttggcagaaaacttctgattcaagttgctattcttctcgttcgcaagcttctatacctctttgcaaagatggagatagcgttccgtattaccacccattggttccatgtataagcggaaccacgagtaaacgctggatttctatacagaacaggtctgctgttgcaggaacaacctctgccgggcttgaaattcatggtttaaaaccggaagaattcttcgaggatacacaaatatggagatcagctctgaaaaactattggtccttgcttacacctctaattttctctgaccatccgaagagacccggtgatgaggatcctctcccgcctttcaacatgatacgcaatgtgatggacatgcatgctcgttttgggaatttaaatgccgctttactcgacgaaggaaaatctgcttgggtaatgaacgtcgtcccagtcaatgcacgtaatactcttcctatcatacttgatcgtggtttcgccggtgttctacatgactggtgtgaaccattcccgacatatcctcgaacatatgacatgcttcatgccaatgaacttctcacacatcttagctcagaacgatgcagcctaatggacttgttcttggagatggaccggattcttcgccctgagggatgggttgttctaagcgacaaagtgggagtaatcgagatggctcgagcacttgcagctcgagtgcgttgggaagcaagagtcattgatcttcaagatggtagtgaccaaagacttctcgtctgtcaaaaaccattcatcaaaaaataa

SEQ ID NO: 663 - protein, 619 aa, Arabidopsis thaliana
MRGSWYKSVSSVFGLRPRIRGLLFFIVGVVALVTILAPLTSNSYDSSSSSTLVPNIYSNYRRIKEQAAVDYLDLRSLSLGASLKEFPFCGKERESYVPCYNITGNLLAGLQEGEELDRHCEFEREKERCVVRPPRDYKIPLRWPLGRDIIWSGNVKITKDQFLSSGTVTTRLMLLEENQITFHSEDGLVFDGVKDYARQIAEMIGLGSDTEFAQAGVRTVLDIGCGFGSFGAHLVSLKLMPICIAEYEATGSQVQLALERGLPAMIGNFFSKQLPYPALSFDMVHCAQCGTTWDIKDAMLLLEVDRVLKPGGYFVLTSPTNKAQGNLPDTKKTSISTRVNELSKKICWSLTAQQDETFLWQKTSDSSCYSSRSQASIPLCKDGDSVPYYHPLVPCISGTTSKRWISIQNRSAVAGTTSAGLEIHGLKPEEFFEDTQIWRSALKNYWSLLTPLIFSDHPKRPGDEDPLPPFNMIRNVMDMHARFGNLNAALLDEGKSAWVMNVVPVNARNTLPIILDRGFAGVLHDWCEPFPTYPRTYDMLHANELLTHLSSERCSLMDLFLEMDRILRPEGWVVLSDKVGVIEMARALAARVRWEARVIDLQDGSDQRLLVCQKPFIKK

SEQ ID NO: 664 - DNA, 519 bp, Arabidopsis thaliana
atgcgaattttgtgtgatgcttgtgagagcgccgccgctatcgtcttttgcgccgccgacgaagctgccctctgttgctcctgcgacgaaaaagttcataagtgcaacaagctggctagtcggcatcttcgtgtaggcttagctgatccgagtaatgcaccaagctgtgacatatgcgaaaatgcacccgcattcttttactgtgagatagatggtagttccctttgtctacaatgtgatatggtggtacatgttggtgggaagagaacacataggcggtttctattactgagacagagaattgagtttccaggcgataagcctaatcatgctgaccaactgggactacggtgtcaaaaggcttcctctggtcgtggtcaagaatcaaatgggaatggtgatcatgatcataatatgatcgatcttaactccaatcctcaaagagtacacgagcctggatcacataaccaagaggagggtattgatgtaaataacgcaaacaatcacgagcatgaatag

SEQ ID NO: 665 - protein, 172 aa, Arabidopsis thaliana
MRILCDACESAAAIVFCAADEAALCCSCDEKVHKCNKLASRHLRVGLADPSNAPSCDICENAPAFFYCEIDGSSLCLQCDMVVHVGGKRTHRRFLLLRQRIEFPGDKPNHADQLGLRCQKASSGRGQESNGNGDHDHNMIDLNSNPQRVHEPGSHNQEEGIDVNNANNHEHE

SEQ ID NO: 666 - DNA, 1200 bp, Arabidopsis thaliana
atggttttttcttcatttcctacttatcctgatcattcatcaaactggcaacaacaacatcaaccaatcacaaccaccgttggattcacgggaaataacatcaaccaacagtttcttcctcaccatcccctcccaccgcaacagcaacaaacgcctccgcagcttcaccacaacaacggtaacggcggagtcgctgttcccggtggacctggcgggttaatccgaccaggttcgatggcggaaagagcaaggctagccaacataccattacctgaaacagccttgaagtgtccaagatgtgactcaactaacaccaaattctgttacttcaacaactacagtctcactcaacctcgccacttctgcaaagcatgccgtcgttactggacacgtggcggtgctctaaggagcgttcccgtcggtggcggttgccgtagaaacaaaagaaccaaaaacagcagcggtggaggtggcggtagcaccagtagcggtaacagcaagtcacaagacagcgccacgagcaacgaccaataccaccaccgagccatggctaacaatcagatgggaccaccttcttcgtcatcgtctctaagctcgttgctgtcttcttacaacgcagggttaatccccggacatgatcataacagcaataacaacaacatacttggacttggatcatctttgcctcctcttaagcttatgcctcctttagacttcacagacaacttcaccttacaatacggtgccgtttcagctccttcttatcatataggcggtggaagcagtggaggagcggcggctcttttaaacggttttgaccagtggagattcccggcaacaaaccaacttcctttaggcggtttagacccgtttgatcaacaacatcaaatggagcagcagaatccaggttacggattggttaccgggtcgggtcagtatcgacctaagaacattttccataaccttatctcctcttcttcgtctgcttcatcagctatggttacagccaccgcgtcgcaattagcttcagtgaaaatggaagatagtaacaatcagctcaacttgtctagacaactttttggagacgaacaacagctctggaatattcatggcgctgctgcagcatccaccgcagctgcaacaagttcgtggagtgaagtctctaataatttcagttcttcttctactagcaatatataa

SEQ ID NO: 667 - protein, 399 aa, Arabidopsis thaliana
MVFSSFPTYPDHSSNWQQQHQPITTTVGFTGNNINQQFLPHHPLPPQQQQTPPQLHHNNGNGGVAVPGGPGGLIRPGSMAERARLANIPLPETALKCPRCDSTNTKFCYFNNYSLTQPRHFCKACRRYWTRGGALRSVPVGGGCRRNKRTKNSSGGGGGSTSSGNSKSQDSATSNDQYHHRAMANNQMGPPSSSSSLSSLLSSYNAGLIPGHDHNSNNNNILGLGSSLPPLKLMPPLDFTDNFTLQYGAVSAPSYHIGGGSSGGAAALLNGFDQWRFPATNQLPLGGLDPFDQQHQMEQQNPGYGLVTGSGQYRPKNIFHNLISSSSSASSAMVTATASQLASVKMEDSNNQLNLSRQLFGDEQQLWNIHGAAAASTAAATSSWSEVSNNFSSSSTSNI

SEQ ID NO: 668 - DNA, 1110 bp, Arabidopsis thaliana
atggacgctacgaagtggacacagggttttcaagaaatgatgaacgttaaaccaatggagcagatcatgattcctaataacaacacacatcaaccaaacaccacatccaatgcaaggccaaacaccattctcacatctaacggcgtctcaactgctggagcaaccgtctccggcgtaagcaacaacaataacaatacggcggttgtggcggagaggaaagcaagaccacaagagaaactaaattgtccaagatgcaactcaaccaacacaaagttttgttactacaacaactatagtctcacacaaccaagatacttctgcaaaggttgtcgaaggtattggaccgaaggtggatctcttaggaatgttcctgtgggaggaagctcaagaaagaacaagagatcatcttcatcttcttcatcaaacatccttcagacaataccatcttcacttccagatctaaacccgccaatactcttctcaaaccaaatccataataaatcgaaagggtcatcacaagatctcaacttgttgtctttcccagtcatgcaagatcaacatcatcatcatgtccatatgtctcagtttcttcagatgcctaagatggagggaaatggtaacataactcatcagcagcagccttcatcatcttcttctgtctatggttcctcgtcgtctcctgtttcagctcttgaacttttaagaaccggagttaatgtttcttcaagatcagggattaactcatcgttcatgccttccggttcaatgatggattcaaacactgtgctttacacttcttcagggtttccaacaatggtggattacaagccaagtaatctctccttctctaccgatcatcaagggcttggacacaatagcaacaataggtctgaagctcttcatagtgatcatcaccaacaaggtagagttttgtttccatttggggatcaaatgaaggagctttcatcaagcataacacaagaagttgatcatgatgataatcaacaacagaagagtcatggaaataataataataataataactcaagccctaataatggatattggagtgggatgttcagtactacaggaggaggatcttcatggtga

SEQ ID NO: 669 - protein, 369 aa, Arabidopsis thaliana
MDATKWTQGFQEMMNVKPMEQIMIPNNNTHQPNTTSNARPNTILTSNGVSTAGATVSGVSNNNNNTAVVAERKARPQEKLNCPRCNSTNTKFCYYNNYSLTQPRYFCKGCRRYWTEGGSLRNVPVGGSSRKNKRSSSSSSSNILQTIPSSLPDLNPPILFSNQIHNKSKGSSQDLNLLSFPVMQDQHHHHVHMSQFLQMPKMEGNGNITHQQQPSSSSSVYGSSSSPVSALELLRTGVNVSSRSGINSSFMPSGSMMDSNTVLYTSSGFPTMVDYKPSNLSFSTDHQGLGHNSNNRSEALHSDHHQQGRVLFPFGDQMKELSSSITQEVDHDDNQQQKSHGNNNNNNNSSPNNGYWSGMFSTTGGGSSW

SEQ ID NO: 670 - DNA, 741 bp, Arabidopsis thaliana
atgatgacgtcatcccatcagagcaacaccaccggctttaaaccgcggcggatcaagacgacggcgaagccaccacgtcagatcaataacaaagaaccatctccggcgacgcagccggtgctcaagtgtccgagatgtgattcagtcaacaccaaattctgctactacaacaactacagcttgtctcagccacgtcactactgcaagaactgtcgtcgttactggacacgtggcggcgccctccgtaacgttcccatcggtggctccactcgaaacaagaacaagccttgcagcctccaagtcatctcttctcctcctttgttctcgaacgggacgtcatcggcgtctcgtgagcttgtaagaaaccatccatcgacggcaatgatgatgatgagttctggtggattctccggctatatgtttccgttggatcctaacttcaaccttgcctcgtcttctatcgagtctttgagttcttttaaccaagatttgcaccagaagcttcagcaacaaagactcgtcacttccatgtttctccaagattctcttccggttaacgagaaaacggttatgtttcagaacgtagagttgattcctccttcgacggtgacgacggattgggttttcgataggttcgccactggaggaggtgcaacaagtggcaatcatgaagataatgatgatggggagggtaatttgggaaattggttccataatgctaataataatgctctgctctaa

SEQ ID NO: 671 - protein, 246 aa, Arabidopsis thaliana
MMTSSHQSNTTGFKPRRIKTTAKPPRQINNKEPSPATQPVLKCPRCDSVNTKFCYYNNYSLSQPRHYCKNCRRYWTRGGALRNVPIGGSTRNKNKPCSLQVISSPPLFSNGTSSASRELVRNHPSTAMMMMSSGGFSGYMFPLDPNFNLASSSIESLSSFNQDLHQKLQQQRLVTSMFLQDSLPVNEKTVMFQNVELIPPSTVTTDWVFDRFATGGGATSGNHEDNDDGEGNLGNWFHNANNNALL

SEQ ID NO: 672 - DNA, 729 bp, Arabidopsis thaliana
atgaagatttggtgtgctgtttgtgataaagaagaagcttcggtgttttgttgtgcggatgaagcagctctttgtaatggttgcgatcgccatgttcatttcgccaataaactagccgggaaacatctccggttctctctcacttctcctactttcaaagatgctcctctttgtgatatttgcggggagaggcgtgcattattattttgccaagaagacagagcaatactatgcagagaatgtgacattccaatacatcaagctaatgagcacactaagaaacacaatagattcctccttaccggcgttaagatctctgcctccccgtcagcctacccaagagcctccaattccaactctgctgctgcatttggtcgagccaaaacccgaccaaaatcagtatcgagcgaggtcccgagctcggcctccaatgaggtatttacgagctcttcttcgacgaccacgagcaattgctattatgggatagaagaaaactaccatcacgtgagcgattcggggtcgggatcgggttgtacaggtagtatatccgagtatttgatggagacattaccgggttggagagtggaggatttgcttgaacacccttcttgtgtctcctatgaggataacattattactaataacaataacagtgagtcttatagggtttatgatggttcttcacaattccatcatcaagggttttgggatcacaaacccttctcttga

SEQ ID NO: 673 - protein, 242 aa, Arabidopsis thaliana
MKIWCAVCDKEEASVFCCADEAALCNGCDRHVHFANKLAGKHLRFSLTSPTFKDAPLCDICGERRALLFCQEDRAILCRECDIPIHQANEHTKKHNRFLLTGVKISASPSAYPRASNSNSAAAFGRAKTRPKSVSSEVPSSASNEVFTSSSSTTTSNCYYGIEENYHHVSDSGSGSGCTGSISEYLMETLPGWRVEDLLEHPSCVSYEDNIITNNNNSESYRVYDGSSQFHHQGFWDHKPFS

SEQ ID NO: 674 - DNA, 625 bp, Arabidopsis thaliana
acacgatcaaaactcattattcaacaaagtcttcgtttcatttttcatttttcatttctcaaccaaaaaaaaaaagagtgattttttttttaatcatcagtcaaatggaaaggggaagatcagatatggagatgataaacaacatggcaaattgcttgattcttctatcaaaggcccatcaaaacgacaccaaaagccgtgttttcgcgtgcaagacatgcaacaaagagttcccgtcgttccaagccttgggaggtcaccgagccagccaccggcgatccgcagcgcttgaaggccacgcacctccttctcctaagagagtcaaaccggtgaaacacgagtgtcccatatgtggtgctgagttcgcggtagggcaggccttaggtggtcacatgaggaagcatagaggtggatcaggaggaggaggtggccggagtttggcgccggctacagcgccggtgacgatgaagaaatcaggcggtggtaatggaaaaagagttttgtgtttggacttgaacttgacgcctttagagaacgaagatttgaagttggagcttgggaggtttattttctgatttttgttcgtttttctttttagggtatacttgtgtagggtaagtttatt

SEQ ID NO: 675 - protein, 156 aa, Arabidopsis thaliana
MERGRSDMEMINNMANCLILLSKAHQNDTKSRVFACKTCNKEFPSFQALGGHRASHRRSAALEGHAPPSPKRVKPVKHECPICGAEFAVGQALGGHMRKHRGGSGGGGGRSLAPATAPVTMKKSGGGNGKRVLCLDLNLTPLENEDLKLELGRFIF

SEQ ID NO: 676 - DNA, 750 bp, Arabidopsis thaliana
atggataacttgaatgttttcgcaaatgaagacaatcaagtgaatgatgtgaagcccccaccaccaccacctcgagtgtgtgcaaggtgtgattctgataatactaaattttgttattacaacaactactgtgagtttcagccacgatacttctgcaagaactgtcgtagatactggactcatggtggggctttaagaaacataccaattggtggaagtagtcgtgccaaacgggcaagggtaaatcaaccttcggttgctcggatggtttctgttgagacccaacgaggtaacaatcaacctttctctaatgttcaagaaaacgttcatcttgttggatcttttggtgcttcatcttcatcttctgttggtgctgttgggaacctttttggttctttgtatgatattcatggtggtatggtaacaaatttgcatccaactcgaactgttcgaccaaatcatcgcttagctttccatgatggatcatttgagcaagactattacgatgttgggtccgataatcttttggtcaaccaacaagttggtggctacggttatcacatgaatccagtggatcaattcaagtggaaccagagcttcaacaacactatgaacatgaattataataacgatagcactagtggaagtagcagaggatctgacatgaatgtgaaccatgataacaagaagatcagataccgcaactctgtgattatgcatccttgtcatctggagaaggatggtccttga

SEQ ID NO: 677 - protein, 249 aa, Arabidopsis thaliana
MDNLNVFANEDNQVNDVKPPPPPPRVCARCDSDNTKFCYYNNYCEFQPRYFCKNCRRYWTHGGALRNIPIGGSSRAKRARVNQPSVARMVSVETQRGNNQPFSNVQENVHLVGSFGASSSSSVGAVGNLFGSLYDIHGGMVTNLHPTRTVRPNHRLAFHDGSFEQDYYDVGSDNLLVNQQVGGYGYHMNPVDQFKWNQSFNNTMNMNYNNDSTSGSSRGSDMNVNHDNKKIRYRNSVIMHPCHLEKDGP

SEQ ID NO: 678 - DNA, 519 bp, Arabidopsis thaliana
atgaaccaccgggacaaacaaattgattccggctctggctctggagaaaaccgccggacttatgactgcgacatctgcaagagaggtttcacgaatcctcaagccctcggtggtcacaataacatccaccgcagggaacgcgaaagatacccctcctcctcttcttcttctcactcatttccattttctcttccgttaccatctcagtctccctcctcctccacaaacttcacaaaccctcctccttattttccgaccattgagtcatacctacaccaagggtctcagccacctattaaccctagccacaacacacaatactttggatcatcatcatcatcaagaggaggagggagatttgctcaaggggcgtctcatgatcttaatttgagcttagggctcggatccatgaatgaagatgatgacactcaccggagcccaccagagaccggaggttctcaacctcaagatggtgatcttgatcttgatcttcgactcggcggtcatcgtcatcattaa

SEQ ID NO: 679 - protein, 172 aa, Arabidopsis thaliana
MNHRDKQIDSGSGSGENRRTYDCDICKRGFTNPQALGGHNNIHRRERERYPSSSSSSHSFPFSLPLPSQSPSSSTNFTNPPPYFPTIESYLHQGSQPPINPSHNTQYFGSSSSSRGGGRFAQGASHDLNLSLGLGSMNEDDDTHRSPPETGGSQPQDGDLDLDLRLGGHRHH

SEQ ID NO: 680 - DNA, 1047 bp, Arabidopsis thaliana
atggctgatccagattgtatcttcagaaatggatatgtagactactataactatagcttcaactatgccacttccctctcacgcatctacaactctcatgacagcttttattatcctcaccagacgacaaacccaaacatcaacgaaaaccctaatttgacttcacctgactctcctccacttagagaagccctccctctccttagcttaagccccattcataagcatcaagaacctactgctaaccaccatgagtactatttcatggagacgacagaaacttcctctaattcaaactttcttgatcaatgccaagacagttatcgtcatgatgtaaccgtggatcttcatctagggttaccaaacctcggtgatggtggaagcagcagcagcgatgtggtccttgattccaccgaccaccaagagggtcaccatgatcatcatcaagatcaaggacttgaagttactatggcttctgaccatgatgatgaacatggtggcttacaaaggggtaatcatcttcatcacttttggatcccgactccttctcagattctgatgggtccaacacagttctcttgtcctctatgcttcaagactttcaacagatacaacaacatgcaaatgcacatgtggggacatggttcacaatacagaaaaggaccggagtcgctgagagggacacaaccaacggcgatgctgaagctgccttgctactgctgtgcaccgggctgcaagaacaacatagaccacccaagggctaggccgctcaaggacttccgtacgcttcagacacattacaagcggaagcacggtgtgaggccctttgcttgtcgtaggtgtgggaaggcatttgcggtcaaaggagattggaggactcacgagaagaactgtgggaagctatggtattgctcatgtgggtcggattttaagcacaagaggtcacttaaagaccacgttaaggcctttgggaatggtcatgtcccttgttgtggaattgatcatgaggaagaggaggctgcttctgatgtcgagcagcaagaatga

SEQ ID NO: 681 - protein, 348 aa, Arabidopsis thaliana
MADPDCIFRNGYVDYYNYSFNYATSLSRIYNSHDSFYYPHQTTNPNINENPNLTSPDSPPLREALPLLSLSPIHKHQEPTANHHEYYFMETTETSSNSNFLDQCQDSYRHDVTVDLHLGLPNLGDGGSSSSDVVLDSTDHQEGHHDHHQDQGLEVTMASDHDDEHGGLQRGNHLHHFWIPTPSQILMGPTQFSCPLCFKTFNRYNNMQMHMWGHGSQYRKGPESLRGTQPTAMLKLPCYCCAPGCKNNIDHPRARPLKDFRTLQTHYKRKHGVRPFACRRCGKAFAVKGDWRTHEKNCGKLWYCSCGSDFKHKRSLKDHVKAFGNGHVPCCGIDHEEEEAASDVEQQE

SEQ ID NO: 682 - DNA, 951 bp, Arabidopsis thaliana
atgtcctcccataccaatctcccctctcccaaaccagttcctaaaccagatcaccgtatctccggtacatcccaaaccaagaaaccaccgtcttcctccgtagctcaagaccaacaaaacctaaaatgccctcgttgcaactctccaaacacaaagttctgttactacaacaactacagtctctctcaacctcgtcacttctgcaaatcttgtcgccgttactggacacgtggcggtgctctaagaaacgtccccatcggtggtggttgccggaaaaccaaaaaatctatcaaacctaattcctccatgaacacacttccttcgtcttcttcctctcagaggttcttctcatcaatcatggaagattcatccaaattcttccctcctccgacaacaatggattttcagctggccggattatctctcaacaaaatgaacgatcttcaacttttgaataaccaagaagttcttgatcttaggcccatgatgtcctcgggccgagaaaacacacccgttgatgtcgggtcgggtttatccctaatgggttttggagatttcaacaacaaccattcaccgacggggttcacaaccgccggagcaagcgacggaaacttagcttcttctatagagactttgagttgtttaaaccaagatttacactggaggcttcagcaacagaggatggcgatgctttttggtaattctaaggaagaaactgttgtcgtcgagaggccacaacctattctttatcggaatcttgagatcgtaaactcatcatcgccgtcgtcgccgacgaagaaaggagataatcagacagagtggtattttggtaataacagtgataatgaaggagtgattagtaataatgctaatacaggaggaggaggaagtgaatggaacaatggaattcaagcttggactgatcttaatcattataatgcattgccttga

SEQ ID NO: 683 - protein, 316 aa, Arabidopsis thaliana
MSSHTNLPSPKPVPKPDHRISGTSQTKKPPSSSVAQDQQNLKCPRCNSPNTKFCYYNNYSLSQPRHFCKSCRRYWTRGGALRNVPIGGGCRKTKKSIKPNSSMNTLPSSSSSQRFFSSIMEDSSKFFPPPTTMDFQLAGLSLNKMNDLQLLNNQEVLDLRPMMSSGRENTPVDVGSGLSLMGFGDFNNNHSPTGFTTAGASDGNLASSIETLSCLNQDLHWRLQQQRMAMLFGNSKEETVVVERPQPILYRNLEIVNSSSPSSPTKKGDNQTEWYFGNNSDNEGVISNNANTGGGGSEWNNGIQAWTDLNHYNALP

SEQ ID NO: 684 - DNA, 678 bp, Arabidopsis thaliana
atgccttctgaattcagtgaatctcgtcgggttcctaagattccccacggccaaggaggatctgttgcgattccgacggatcaacaagagcagctttcttgtcctcgctgtgaatcaaccaacaccaagttctgttactacaacaactacaacttctcacaacctcgtcatttctgcaagtcttgtcgccgttactggactcatggaggtactctccgtgacattcccgtcggtggtgtttcccgtaaaagctcaaaacgttcccggacttattcctctgccgctaccacctccgttgtcggaagccggaactttcccttacaagctacgcctgttcttttccctcagtcgtcttccaacggcggtatcacgacggcgaagggaagtgcttcgtcgttctatggcggtttcagctctttgatcaactacaacgccgccgtgagcagaaatgggcctggtggcgggtttaatgggccagatgcttttggtcttgggcttggtcacgggtcgtattatgaggacgtcagatatgggcaaggaataacggtctggccgttttcaagtggcgctactgatgctgcaactactacaagccacattgctcaaatacccgccacgtggcagtttgaaggtcaagagagcaaagtcgggttcgtgtctggagactacgtagcgtga

SEQ ID NO: 685 - protein, 225 aa, Arabidopsis thaliana
MPSEFSESRRVPKIPHGQGGSVAIPTDQQEQLSCPRCESTNTKFCYYNNYNFSQPRHFCKSCRRYWTHGGTLRDIPVGGVSRKSSKRSRTYSSAATTSVVGSRNFPLQATPVLFPQSSSNGGITTAKGSASSFYGGFSSLINYNAAVSRNGPGGGFNGPDAFGLGLGHGSYYEDVRYGQGITVWPFSSGATDAATTTSHIAQIPATWQFEGQESKVGFVSGDYVA

SEQ ID NO: 686 - DNA, 630 bp, Arabidopsis thaliana
atgccgtcggaaccaaaccaaacccgacccaccagagttcagccctcaacggcggcttacccaccgccaaatctggctgagcctcttccttgtcctcgctgcaactccaccaccaccaagttctgttactacaacaactataacctcgctcagcctcgctactactgcaaatcttgccgccgttactggactcaaggtggtacactccgtgacgtccccgtcggtggtggaactcgtcgaagctcctcaaaacgtcaccgttctttctccaccactgccacctcctcttcctcctcttcttccgtcatcaccaccacgacacaagaaccagccacgactgaagcgagtcaaactaaggttactaatttaatttcaggtcatggaagctttgcttctctgttaggtttaggaagtggaaatggtgggttggattacgggtttgggtacgggtacgggcttgaggagatgagtattgggtatcttggagattcttccgtaggagagattccggtggttgatggttgtggtggtgacacgtggcagattggggagattgaaggtaaaagtggaggagacagtttgatatggcctggtcttgagatctcaatgcaaaccaacgatgttaagtga

SEQ ID NO: 687 - protein, 209 aa, Arabidopsis thaliana
MPSEPNQTRPTRVQPSTAAYPPPNLAEPLPCPRCNSTTTKFCYYNNYNLAQPRYYCKSCRRYWTQGGTLRDVPVGGGTRRSSSKRHRSFSTTATSSSSSSSVITTTTQEPATTEASQTKVTNLISGHGSFASLLGLGSGNGGLDYGFGYGYGLEEMSIGYLGDSSVGEIPVVDGCGGDTWQIGEIEGKSGGDSLIWPGLEISMQTNDVK

SEQ ID NO: 688 - DNA, 615 bp, Arabidopsis thaliana
atgcaggatccagcagcatattaccagacgatgatggcgaagcaacaacaacaacaacaaccacagtttgcagagcaagaacagttaaagtgtcctcgttgtgactcaccaaacactaaattctgttactacaacaactacaatctctcacagcctcgtcacttttgcaaaagctgtcgtcgttactggactaaaggcggcgctctccgtaacgttcccgtcggtggtggttctcgtaagaacgcaaccaaacgatccacttcttcttcttcttctgcttcctctccttccaacagtagccaaaacaagaagacgaaaaacccggatccggatcctgatccacgtaattctcaaaaaccggatttggatccgacccggatgctttacgggtttccgatcggtgaccaagacgtgaagggtatggagattggtggaagctttagctcgttgttggcgaataatatgcagcttggtcttggaggaggagggatcatgcttgacgggtcgggttgggatcatccgggtatgggtttgggtttgaggagaaccgaaccgggtaataataataataacccatggaccgatctggctatgaacagagcggagaaaaactga

SEQ ID NO: 689 - protein, 204 aa, Arabidopsis thaliana
MQDPAAYYQTMMAKQQQQQQPQFAEQEQLKCPRCDSPNTKFCYYNNYNLSQPRHFCKSCRRYWTKGGALRNVPVGGGSRKNATKRSTSSSSSASSPSNSSQNKKTKNPDPDPDPRNSQKPDLDPTRMLYGFPIGDQDVKGMEIGGSFSSLLANNMQLGLGGGGIMLDGSGWDHPGMGLGLRRTEPGNNNNNPWTDLAMNRAEKN

SEQ ID NO: 690 - DNA, 924 bp, Arabidopsis thaliana
atgcaagatattcatgatttctccatgaacggagttggtggtgggggaggaggaggagggaggtttttcggtggaggaatcggcggcggaggaggtggtgatcgaaggatgagagctcatcagaacaatatacttaaccatcatcaatctctcaagtgtcctcgttgtaattctcttaacacaaagttctgttactacaacaattacaatctttctcagcctcgtcacttttgcaagaactgtcgtcgttactggactaaaggtggtgttctccgtaacgttcccgtcggaggtggttgccggaaagctaaacgttcgaaaacaaaacaggttccgtcgtcgtcatcagccgacaaaccaacgacgacgcaagatgatcatcacgtggaggagaaatcgagtacaggatctcactctagcagcgagagctcttctctcaccgcttctaactctaccaccgtcgccgccgtctccgtcaccgcggcggcggaagttgcttcgtcggttattccaggttttgatatgcctaatatgaaaatttacggtaacgggatcgagtggtcgacgttacttggacaaggctcatcggccggtggtgttttctcggagatcggtggttttccggcggtttcagctattgaaactacaccgtttggattcgggggtaaattcgtaaatcaagatgatcatctgaagttagaaggtgaaactgtacagcagcaacagtttggagatcgaacggctcaggttgagtttcaaggaagatcttcggatccgaatatgggatttgaaccgttggattggggaagtggcggtggagatcaaacactgtttgatttaaccagtaccgttgatcatgcatactggagtcaaagtcaatggacgtcgtctgaccaagatcagagtggtctctaccttccttga

SEQ ID NO: 691 - protein, 307 aa, Arabidopsis thaliana
MQDIHDFSMNGVGGGGGGGGRFFGGGIGGGGGGDRRMRAHQNNILNHHQSLKCPRCNSLNTKFCYYNNYNLSQPRHFCKNCRRYWTKGGVLRNVPVGGGCRKAKRSKTKQVPSSSSADKPTTTQDDHHVEEKSSTGSHSSSESSSLTASNSTTVAAVSVTAAAEVASSVIPGFDMPNMKIYGNGIEWSTLLGQGSSAGGVFSEIGGFPAVSAIETTPFGFGGKFVNQDDHLKLEGETVQQQQFGDRTAQVEFQGRSSDPNMGFEPLDWGSGGGDQTLFDLTSTVDHAYWSQSQWTSSDQDQSGLYLP

SEQ ID NO: 692 - DNA, 795 bp, Arabidopsis thaliana
atggtggaacgtgctcggatcgcaaaagtcccattgcctgaagcagctctaaattgccctagatgtgactcaaccaatactaagttctgttacttcaataactatagccttactcaacctcgccatttctgcaaaacatgtcgtcgctattggacacgtggcggttccttgaggaatgttcctgttggaggaggctttaggaggaacaagagaagcaaatccagatcgaaatctacggtcgtggtctcgactgataatactactagtacttcatcacttacttctcgcccaagttactcaaaccctagcaagtttcatagctacggtcaaatcccggagtttaattccaacttgcccatcttgcctcctctccaaagccttggagattacaattcaagcaacactggattagattttggtggaactcaaataagcaacatgataagtggtatgagttctagtggtgggatcttggatgcatggagaatacctccatcacaacaagctcagcaattccctttcttgatcaacactaccggattggtgcaatcttcaaacgcgttatatccattactagaaggcggggttagcgccacgcaaacaagaaatgtgaaggcggaagagaatgatcaggatcggggtagggatggggatggagtgaataacttatcaagaaactttttgggtaatatcaacataaactcaggcaggaacgaggaatacacatcatggggaggtaacagttcttggaccggtttcacctccaacaactcaacaggccatctctcattctaa

SEQ ID NO: 693 - protein, 264 aa, Arabidopsis thaliana
MVERARIAKVPLPEAALNCPRCDSTNTKFCYFNNYSLTQPRHFCKTCRRYWTRGGSLRNVPVGGGFRRNKRSKSRSKSTVVVSTDNTTSTSSLTSRPSYSNPSKFHSYGQIPEFNSNLPILPPLQSLGDYNSSNTGLDFGGTQISNMISGMSSSGGILDAWRIPPSQQAQQFPFLINTTGLVQSSNALYPLLEGGVSATQTRNVKAEENDQDRGRDGDGVNNLSRNFLGNININSGRNEEYTSWGGNSSWTGFTSNNSTGHLSF

SEQ ID NO: 694 - DNA, 993 bp, Arabidopsis thaliana
atggttttctcctccatccaagcctatcttgattcatccaactggcaacaggctcctccgagcaattataatcatgacggaacaggcgcctcagcaaatggaggtcatgttcttcgtcctcagctgcagccacagcagcagccacagcagcagccgcatcctaatgggagcgggggcggaggtggaggtggaggcggctcgatccgagcaggatcaatggtggacagagcaagacaagcaaacgtagccttgccagaagcagcactgaaatgtccgagatgcgaatccaccaacaccaagttctgctacttcaacaactacagcctcactcaaccacgccacttctgcaagacctgccggagatactggacacgtggcggagctctccgcaacgtcccagtcggcggtggctgccggagaaacaggcgtaccaaaagcaacagcaacaacaacaataacagcactgctactagcaataacaccagtttctcctccgggaatgcatccaccatcagcacgattctctcctcccactatggaggaaaccaagagagtatcttaagccagattttgtctccggcgaggctaatgaatcctacttacaatcatctcggagatctcacaagtaatacaaaaacagacaacaacatgagcttgttgaactatggaggattgagtcaagacttgaggtcaatccacatgggagcttctggtggctcgcttatgagctgtgttgatgaatggagatcggcgtcttatcatcagcagtcaagtatgggcggtgggaacttggaggattcttctaatcctaatccatccgcaaatgggttttactcttttgagtcgccgaggataacttcagcgtcaatctcttctgctttagcatcgcagttttcttcggttaaagttgaagataatccttacaaatgggttaatgtcaatggtaattgctcttcctggaatgatctttctgctttcggctcttctcgttga

SEQ ID NO: 695 - protein, 330 aa, Arabidopsis thaliana
MVFSSIQAYLDSSNWQQAPPSNYNHDGTGASANGGHVLRPQLQPQQQPQQQPHPNGSGGGGGGGGGSIRAGSMVDRARQANVALPEAALKCPRCESTNTKFCYFNNYSLTQPRHFCKTCRRYWTRGGALRNVPVGGGCRRNRRTKSNSNNNNNSTATSNNTSFSSGNASTISTILSSHYGGNQESILSQILSPARLMNPTYNHLGDLTSNTKTDNNMSLLNYGGLSQDLRSIHMGASGGSLMSCVDEWRSASYHQQSSMGGGNLEDSSNPNPSANGFYSFESPRITSASISSALASQFSSVKVEDNPYKWVNVNGNCSSWNDLSAFGSSR

SEQ ID NO: 696 - DNA, 744 bp, Arabidopsis thaliana
atggagagagcagaggccttgacatcatcgtttatatggcggccaaacgcaaacgcaaacgcggagatcacgccgagttgtccaagatgtggatcctctaacacaaagttctgttactacaacaactatagcctcactcagcctcgctacttctgcaaaggctgccgcagatattggaccaaaggtggttccctccgcaatgttcctgtaggcggtggctgtcgaaaatcccgccgccccaaatcatcttctggtaacaatactaaaactagcctaaccgctaattctggcaaccccggtggtggttcaccaagcatcgatcttgctcttgtttacgccaatttcttgaatccaaagcctgacgaatctatactacaagaaaattgcgacttagccactacggattttttggtagataatcctaccggcacttccatggacccttcatggagtatggacatcaatgatggtcatcatgatcattatattaatccggtggaacacattgtggaggaatgtggttataatggcttgcctccatttcctggtgaagagcttctctctttagacactaatggtgtttggtctgatgctttgttgattggtcataaccatgtagacgttggcgtgactccggttcaggctgtacacgaaccggtggttcatttcgctgacgaatccaatgattccaccaatctcttgtttggaagttggagcccttttgatttcactgccgatggatga

SEQ ID NO: 697 - protein, 247 aa, Arabidopsis thaliana
MERAEALTSSFIWRPNANANAEITPSCPRCGSSNTKFCYYNNYSLTQPRYFCKGCRRYWTKGGSLRNVPVGGGCRKSRRPKSSSGNNTKTSLTANSGNPGGGSPSIDLALVYANFLNPKPDESILQENCDLATTDFLVDNPTGTSMDPSWSMDINDGHHDHYINPVEHIVEECGYNGLPPFPGEELLSLDTNGVWSDALLIGHNHVDVGVTPVQAVHEPVVHFADESNDSTNLLFGSWSPFDFTADG

SEQ ID NO: 698 - DNA, 945 bp, Arabidopsis thaliana
atggagagatacaagtgtagattttgcttcaagagcttcatcaatggaagagctttaggtggtcacatgagatctcacatgcttactctttctgcagaacgttgtgtaataactggtgaagcagaagaagaagtagaggaacggccgagtcaactctgtgacgacgacgacgataccgagtccgatgcttcttcttcttctggtgagtttgataatcaaaagatgaatcgtcttgatgatgaattggagtttgatttcgctgaagacgacgacgttgaaagtgaaaccgagtcgtccaggattaacccaactcggcgacgatctaaacgaactcggaaacttggatcgtttgatttcgactttgagaagctaacaacgagccaacccagtgagttagtggccgagccagagcatcacagctcagcttctgatacaacaacggaggaagatctcgccttttgtctcattatgctgtccagagacaaatggaagcaacagaagaagaagaagcaacgtgtagaagaagatgagacagatcatgacagtgaagattacaaatcaagcaagagcagagggagattcaagtgtgagacttgtggtaaagtgtttaaatcgtatcaagcattaggaggacacagagcaagccacaagaagaacaaggcatgcatgacgaaaacagagcaagttgaaacagagtacgttcttggagtaaaggagaagaaagttcatgaatgtccgatctgttttagggtttttacttcagggcaagcacttggaggtcataagagatctcacggaagtaacatcggagcaggaagaggattgtcagtaagtcaaattgtccaaatcgaagaagaagtatcagtgaaacagaggatgattgatcttaatcttcctgcacctaatgaagaagatgaaacttctttggtgtttgatgaatggtga

SEQ ID NO: 699 - protein, 314 aa, Arabidopsis thaliana
MERYKCRFCFKSFINGRALGGHMRSHMLTLSAERCVITGEAEEEVEERPSQLCDDDDDTESDASSSSGEFDNQKMNRLDDELEFDFAEDDDVESETESSRINPTRRRSKRTRKLGSFDFDFEKLTTSQPSELVAEPEHHSSASDTTTEEDLAFCLIMLSRDKWKQQKKKKQRVEEDETDHDSEDYKSSKSRGRFKCETCGKVFKSYQALGGHRASHKKNKACMTKTEQVETEYVLGVKEKKVHECPICFRVFTSGQALGGHKRSHGSNIGAGRGLSVSQIVQIEEEVSVKQRMIDLNLPAPNEEDETSLVFDEW

SEQ ID NO: 700 - DNA, 885 bp, Arabidopsis thaliana
atgcagactccgtacactacttcaacgcaggggcaatattgtcattcttgtggaatgttccaccaccatagccaaagctgctgctacaacaacaacaacaactccaacgccggttcttactcgatggtcttctccatgcaaaacggtggcgttttcgagcagaacggtgaggactatcatcactcttcctccctcgttgactgcactctctctcttggaactccttctacgaggctttgtgaggaagatgagaaacgtagacgctctacttcatctggtgcttcttcttgcatctccaacttttgggacttgattcacaccaaaaacaacaactccaaaacggcaccgtacaataacgttccttctttctccgctaacaagccaagtcgcggttgttccggtggtggtggtggcggaggaggcggtggcggaggtgactctcttctcgctagacgctgtgccaactgtgacactacttctactccactatggaggaatggtcctagaggccctaagtccctatgcaacgcatgcggcattcgtttcaagaaggaagagagaagaactactgcggctacaggaaacaccgtcgtcggagctgcaccggttcaaaccgaccagtacgggcatcacaactctggctacaataattaccatgctgccactaataacaacaataataatggtactccgtgggctcatcaccactcgacgcagagggttccgtgtaattatccggcaaatgagatcaggttcatggatgattacggcagtggagtagcaaacaacgttgaatccgacggtgctcacggcggtgttccgttcctttcttggaggcttaatgtagcggatagggcaagtcttgtccatgactttaccagatga

SEQ ID NO: 701 - protein, 294 aa, Arabidopsis thaliana
MQTPYTTSTQGQYCHSCGMFHHHSQSCCYNNNNNSNAGSYSMVFSMQNGGVFEQNGEDYHHSSSLVDCTLSLGTPSTRLCEEDEKRRRSTSSGASSCISNFWDLIHTKNNNSKTAPYNNVPSFSANKPSRGCSGGGGGGGGGGGGDSLLARRCANCDTTSTPLWRNGPRGPKSLCNACGIRFKKEERRTTAATGNTVVGAAPVQTDQYGHHNSGYNNYHAATNNNNNNGTPWAHHHSTQRVPCNYPANEIRFMDDYGSGVANNVESDGAHGGVPFLSWRLNVADRASLVHDFTR

SEQ ID NO: 702 - DNA, 741 bp, Arabidopsis thaliana
atggctccagtcggattacctccaggctttagatttcatccgactgacgaagaactcgtaaactattatctgaaaagaaagatcaacggtcaagaaatcgagcttgatataattcccgaggttgatctctacaaatgcgagccatgggacctcgcagagaagtcgtttctaccaagtagagatccggagtggtatttttttgggccacgtgaccggaagtatccgaacgggtttaggacgaaccgagcaacgagaggtgggtactggaaatcgaccggcaaagatcggagagtgacaagtcaaagcagagcgattgggatgaaaaagactttggtttattataaaggaagagctcctcaagggatccgtacggattgggttatgcatgagtatcgtctcgatgataaggattgtgacgatccctcttcgctccaggactcgtatgcattgtgtcgggtattcaaaaagaacggaatatgttcggagttggaatcagaacggcaattgcaaacgggacaatgtagcttcacaacggcgtcaatggaggagatcaattcgaataacaacaacaattataataatgattatgagacaatgtcgccggaggtgggagtttcctccgcctgcgttgaagaagtagtcgatgataaagacgattcgtggatgcagtttataacagatgacgcatgggacacgtcatcaaatggtgcagctatgggacatggtcaaggggtttattga

SEQ ID NO: 703 - protein, 246 aa, Arabidopsis thaliana
MAPVGLPPGFRFHPTDEELVNYYLKRKINGQEIELDIIPEVDLYKCEPWDLAEKSFLPSRDPEWYFFGPRDRKYPNGFRTNRATRGGYWKSTGKDRRVTSQSRAIGMKKTLVYYKGRAPQGIRTDWVMHEYRLDDKDCDDPSSLQDSYALCRVFKKNGICSELESERQLQTGQCSFTTASMEEINSNNNNNYNNDYETMSPEVGVSSACVEEVVDDKDDSWMQFITDDAWDTSSNGAAMGHGQGVY

SEQ ID NO: 704 - DNA, 945 bp, Arabidopsis thaliana
atggaagaaaatcttcctccggggttcagatttcatcctacagacgaggagctcataacgcattatctatgtcggaaagtctccgatataggattcaccggtaaagctgtcgtcgacgttgatctcaacaagtgtgaaccttgggatttgccagccaaggcttcaatgggagagaaagagtggtatttcttcagccaaagggatcggaaatatccaaccggtttaagaacaaaccgggcaacagaagctggttactggaaaaccaccgggaaagataaagaaatataccgaagtggagtgttggttgggatgaagaaaaccctagttttctacaaaggaagagctcccaaaggtgagaaaagcaattgggttatgcatgagtacaggcttgagagcaaacaacctttcaaccccacgaataaggaggaatgggtagtgtgtagggttttcgaaaagagcacggcagcaaagaaagcacaagaacaacaacctcaatcttctcaaccatcttttggatctccatgcgatgcaaactcatcaatggcaaatgagtttgaagatattgatgagcttccgaatctgaattcaaactcatcaaccatcgattacaataatcatatccatcaatattcgcaacgcaatgtttactcagaagacaacacaacaagtacggctggtctcaacatgaacatgaacatggctagtactaatcttcagtcttggacaacaagtctccttggtccgcctttatctccaatcaactctttgttgctcaaggctttccaaatcaggaactcttatagtttcccaaaagagatgatccccagtttcaatcattcttctcttcaacaaggagtctccaatatgatccaaaatgcttcaagttcgtctcaagtgcaaccccaaccgcaagaggaagcgtttaatatggactccatatggtga

SEQ ID NO: 705 - protein, 314 aa, Arabidopsis thaliana
MEENLPPGFRFHPTDEELITHYLCRKVSDIGFTGKAVVDVDLNKCEPWDLPAKASMGEKEWYFFSQRDRKYPTGLRTNRATEAGYWKTTGKDKEIYRSGVLVGMKKTLVFYKGRAPKGEKSNWVMHEYRLESKQPFNPTNKEEWVVCRVFEKSTAAKKAQEQQPQSSQPSFGSPCDANSSMANEFEDIDELPNLNSNSSTIDYNNHIHQYSQRNVYSEDNTTSTAGLNMNMNMASTNLQSWTTSLLGPPLSPINSLLLKAFQIRNSYSFPKEMIPSFNHSSLQQGVSNMIQNASSSSQVQPQPQEEAFNMDSIW

SEQ ID NO: 706 - DNA, 366 bp, Arabidopsis thaliana
atgtgtagaggcttgaataatgaagagagcagaagaagtgacggaggaggttgccggagtctctgcacgagaccgagtgttccggtaaggtgtgagctttgcgacggagacgcctccgtgttctgtgaagcggactcggcgttcctctgtagaaaatgtgaccggtgggttcatggagcgaattttctagcttggagacacgtaaggcgcgtgctatgcacttcttgtcagaaactcacgcgccggtgcctcgtcggagatcatgacttccacgttgttttaccgtcggtgacgacggtcggagaaaccaccgtggagaatagaagtgaacaagataatcatgaggttccgtttgtttttctctga

SEQ ID NO: 707 - protein, 121 aa, Arabidopsis thaliana
MCRGLNNEESRRSDGGGCRSLCTRPSVPVRCELCDGDASVFCEADSAFLCRKCDRWVHGANFLAWRHVRRVLCTSCQKLTRRCLVGDHDFHVVLPSVTTVGETTVENRSEQDNHEVPFVFL

SEQ ID NO: 708 - DNA, 1155 bp, Arabidopsis thaliana
attcacattactaatctctcaagatttcacaattttcttgtgattttctctcagtttcttatttcgtttcataacatggatgccatgagtagcgtagacgagagctctacaactacagattccattccggcgagaaagtcatcgtctccggcgagtttactatatagaatgggaagcggaacaagcgtggtacttgattcagagaacggtgtcgaagtcgaagtcgaagccgaatcaagaaagcttccttcttcaagattcaaaggtgttgttcctcaaccaaatggaagatggggagctcagatttacgagaaacatcaacgcgtgtggcttggtactttcaacgaggaagacgaagcagctcgtgcttacgacgtcgcggctcaccgtttccgtggccgcgatgccgttactaatttcaaagacacgacgttcgaagaagaggttgagttcttaaacgcgcattcgaaatcagagatcgtagatatgttgagaaaacacacttacaaagaagagttagaccaaaggaaacgtaaccgtgacggtaacggaaaagagacgacggcgtttgctttggcttcgatggtggttatgacggggtttaaaacggcggagttactgtttgagaaaacggtaacgccaagtgacgtcgggaaactaaaccgtttagttataccaaaacaccaagcggagaaacattttccgttaccgttaggtaataataacgtctccgttaaaggtatgctgttgaatttcgaagacgttaacgggaaagtgtggaggttccgttactcttattggaatagtagtcaaagttatgtgttgaccaaaggttggagtagattcgttaaagagaagagactttgtgctggtgatttgatcagttttaaaagatccaacgatcaagatcaaaaattctttatcgggtggaaatcgaaatccgggttggatctagagacgggtcgggttatgagattgtttggggttgatatttctttaaacgccgtcgttgtagtgaaggaaacaacggaggtgttaatgtcgtcgttaaggtgtaagaagcaacgagttttgtaataacaatttaacaacttgggaaagaaaaaaaagctttttgattttaatttctcttcaacgttaatcttgctgagatta

SEQ ID NO: 709 - protein, 333 aa, Arabidopsis thaliana
MDAMSSVDESSTTTDSIPARKSSSPASLLYRMGSGTSVVLDSENGVEVEVEAESRKLPSSRFKGVVPQPNGRWGAQIYEKHQRVWLGTFNEEDEAARAYDVAAHRFRGRDAVTNFKDTTFEEEVEFLNAHSKSEIVDMLRKHTYKEELDQRKRNRDGNGKETTAFALASMVVMTGFKTAELLFEKTVTPSDVGKLNRLVIPKHQAEKHFPLPLGNNNVSVKGMLLNFEDVNGKVWRFRYSYWNSSQSYVLTKGWSRFVKEKRLCAGDLISFKRSNDQDQKFFIGWKSKSGLDLETGRVMRLFGVDISLNAVVVVKETTEVLMSSLRCKKQRVL

SEQ ID NO: 710 - DNA, 894 bp, Arabidopsis thaliana
aacgagccaacaaagcaaaacctctttcttctcttctccactttctctctagattctctcatatttcccctcttgagagtctaacaatggcgtcaacgacgtgtgcaagagaggtgcattacagaggagtcagaaagagaccttggggtcgctacgctgctgagatacgagatccttggaagaaaactagggtttggttaggcactttcgacactcccgaagaagctgctcttgcttacgacggcgctgctcgtttcctccgtggtatcaaagccaaaactaacttcccttctcctctctctctcgacctcaaccacctcccttccgctccctcagccgcaaccgccgccgcaaataaccaaccccaccaacaccaacagctctggttcgctgcgcctcctcctgttcctccaagctccgaccatcatcaccaacaccaccgcatttttctccgaaccggtgtgctaaacgacaaaacttcagattactcttctacagaagcgccgctttacttcacctcctcgcctaacacagccacgtcatcgcctggttatcaagtggttgggtttccgatgatgaattcttctccttcccctgttacggtgagacgtggcttagccattgacctcaacgagcctccgccgctttggctttgaaaacaaacgataaagatggatatagcggcgccgttttgcctacttttctatacggcgccgtttgagaccactttcggtggaactactttagtttcttttttttagcaaatagtatctttttgttagagttagtagacttgtttttataatttaatccttcttttgttcgttatgtaagagtcggagatcgattgttgttgtgagatccatatgttgcggaaaaaacaagaaacttcgt

SEQ ID NO: 711 - protein, 189 aa, Arabidopsis thaliana
MASTTCAREVHYRGVRKRPWGRYAAEIRDPWKKTRVWLGTFDTPEEAALAYDGAARFLRGIKAKTNFPSPLSLDLNHLPSAPSAATAAANNQPHQHQQLWFAAPPPVPPSSDHHHQHHRIFLRTGVLNDKTSDYSSTEAPLYFTSSPNTATSSPGYQVVGFPMMNSSPSPVTVRRGLAIDLNEPPPLWL

SEQ ID NO: 712 - DNA, 1243 bp, Arabidopsis thaliana
tcgagtcaaattctacatcgggatcttactgggttttttttttaaacattaaattcgtaaattcccaaagaaaaaaaaaaaaactcgataccttttgttttacaaagtcgtcacaattctgaaacccttaattgaatccaagagaatttttgattaaattaagtctctggaccctgaagtccccacacaagcaagcttcgatggatcccaagaacctaaatcgtcaccaagtaccaaatttcttgaacccaccaccaccaccgcgaaatcagggtttggtagatgatgatgctgcttctgctgttgtttccgacgagaatcgcaaaccaacaactgagattaaagatttccagatcgtggtctctgcttccgacaaagaaccaaacaagaagagtcagaatcagaaccagcttggtcctaagagaagctctaacaaagacagacacactaaagtcgaaggtagaggtcgacgaattcggatgcctgctctttgtgctgctaggatttttcaattgactagagaattgggtcataaatctgatggtgaaactatccagtggctgcttcaacaagctgagccatcgattattgcagctactggttcaggaactataccggcctctgctttagcttcttcagctgcaacctctaaccatcatcaaggtgggtctcttactgctggtttaatgatcagtcatgacttagatggtgggtctagtagtagtggtagaccattaaattgggggattggtggcggtgaaggagtttctaggtcaagtttaccaactgggttatggccaaatgtagctgggtttggttctggtgtgccaaccactggtttaatgagtgaaggagctggttatagaattgggtttcctggttttgattttcctggtgttggtcatatgagttttgcatctattttgggtgggaatcataatcagatgcctggacttgagttaggcttgtctcaagaagggaatgttggtgttttgaatcctcagtcttttactcagatttatcaacagatgggtcaggctcaggctcaagctcaaggtagggttcttcaccatatgcatcataaccatgaagaacatcagcaagagagtggtgagaaagatgattctcaaggctcaggtcgttaaaaggattgggtttttttttgtatcttctggatttgaaaaagcttttggcttttgttttgtgataatattgttgtaatttgtaccaccatggagaagaa

SEQ ID NO: 713 - protein, 314 aa, Arabidopsis thaliana
MDPKNLNRHQVPNFLNPPPPPRNQGLVDDDAASAVVSDENRKPTTEIKDFQIVVSASDKEPNKKSQNQNQLGPKRSSNKDRHTKVEGRGRRIRMPALCAARIFQLTRELGHKSDGETIQWLLQQAEPSIIAATGSGTIPASALASSAATSNHHQGGSLTAGLMISHDLDGGSSSSGRPLNWGIGGGEGVSRSSLPTGLWPNVAGFGSGVPTTGLMSEGAGYRIGFPGFDFPGVGHMSFASILGGNHNQMPGLELGLSQEGNVGVLNPQSFTQIYQQMGQAQAQAQGRVLHHMHHNHEEHQQESGEKDDSQGSGR

SEQ ID NO: 714 - DNA, 1172 bp, Arabidopsis thaliana
aatcattagcttcttctcttctcttctctcacagagagagtaatcacaagccaagtgagaaaaagaaaacactaaacccagatcgaaaaccatgtctattaacaacaacaacaacaacaacaacaataacaacgatggtcttatgatctcatcaaacggagctttaatcgaacaacaaccatcagtcgttgtgaagaaaccaccggcgaaagatcgacatagcaaagtcgatggaagagggagaagaatccgtatgccgattatatgtgctgctcgtgtttttcagctaacgagagagcttggtcataagtcagatggccaaacaattgaatggttacttcgtcaagcagagccttctattatagctgcaacaggaactggtacaactccagcgagtttctcaactgcttctgtctctatccgtggagccaccaattctacttctttagatcataaacccacttctttacttggtggtacgtcaccgtttatacttgggaaacgtgttagagctgatgaggatagtaataatagtcataatcatagttctgttggtaaagatgagacctttacgacaacaccagctgggttttgggctgttccggcgaggccggattttggacaagtttggagttttgctggagctccacaagagatgtttttacaacaacaacatcatcatcagcaaccattgtttgttcatcagcaacagcaacaacaagctgcaatgggtgaagcttctgctgctagagttgggaattatcttccgggtcatcttaatttgcttgcttctttatccggtggatctcccgggtcggatcgaagagaggaagatccacgttaatggtttaagcccttttaggtttgagggcaaaatttggtatatatatttattatcttctcttctctattgttgtcattgtttctctatgtgtgtgttttagtgttgttagagattgatttggtttcagaatctctgcaagtgatttgagagttttcgttagctttaagtaagttaaagacggttgtttttgattagggttaaattagggtttaagaatctgttgtttttttggagggagatcgatttcttatcggatccaagattacttttaggaaaaaagggaaaatttcagaaaccacggtggtttcttttcctctttttttttttg

SEQ ID NO: 715 - protein, 250 aa, Arabidopsis thaliana
MSINNNNNNNNNNNDGLMISSNGALIEQQPSVVVKKPPAKDRHSKVDGRGRRIRMPIICAARVFQLTRELGHKSDGQTIEWLLRQAEPSIIAATGTGTTPASFSTASVSIRGATNSTSLDHKPTSLLGGTSPFILGKRVRADEDSNNSHNHSSVGKDETFTTTPAGFWAVPARPDFGQVWSFAGAPQEMFLQQQHHHQQPLFVHQQQQQQAAMGEASAARVGNYLPGHLNLLASLSGGSPGSDRREEDPR

SEQ ID NO: 716 - DNA, 2245 bp, Arabidopsis thaliana
acatttgtttctaatctcagacataaataatttttgttcccgacttcaaaaccaacgatgattatatcattccacattcattttcttctacttcttccttctccttgatctcatttccctagaaaatccatctatcatgggtgaagatgatatagtggagctcttatggaagagtggccaagtcgttagaaccagtcaaacacagagaccctcctccaatacaccaccatctcttcctccaccacccattcttcgtggtagcggaagcggcaacggagaagaaaatgccccgcttccacttccacagccttcacctcccctccatcatcagaatcttttcattctggaagacgaaatgtcttcttggcttcaccattctcaccccggcgttacgtccaccccggcttcttctgtctccctgccaccaccacccaatgctccgcgtgaagatgatatagtggagcttttatggcaaagcggccaagtagttggaaccaaccaaacacatagacaatcctacgatcctcctcccattctccgcggcagcggaagtggcagaggagaagaaaatgctcccctttcacaacctccgcctcacctgcatcagcaaaatctcttcattcaagaaggcgaaatgtattcgtggctacaccattcttaccgccaaaactatttctgctcagaacttctcaactccactccggctactcacccgcaaagttccatctctctggcaccacgtcagactatcgccacgagaagggcggaaaactttatgaacttctcgtggctaagagggaacatatttaccggcggtagagttgatgaagctggaccgtcgttttcggtggtaagagaatcgatgcaggtaggctcgaacacgacccccccttcttcttctgccactgaatcatgtgtaataccagctacagagggcaccgcgagtcgagtgtcgggaactttggcagctcatgatcttggtcggaagggaaaggcggtggcggttgaggcggccggaacaccatcttcaggagtgtgcaaggccgaaacagagccggttcagatacaaccagcaacggagtcgaagctaaaagcgagagaagaaacccatggaactgaagaagctcgtggttcaacgtctagaaagagatcacgaactgcagaaatgcataacctcgccgaaaggagaaggagagaaaagatcaacgagaagatgaagactctgcaacaactcattcctcgctgcaacaaggttgaatctgattctgtttctactctgatcagtctactaaagtttcaacgctggatgatgctatcgagtacgtcaaatcgttacagagccaaatacaagtatgctcttcaaaacagaatgtgttttaaaccaatggttcaacatggaaagagttcatatgtatctagttttgttgagatgatgtcgacgggacagggtatgatgtcgccaatgatgaatgccgggaatacgcaacagttcatgccccatatggccatggatatgaaccgacctcctccattcatacctttccccggcacatcttttcctatgccggctcaaatggcaggtgtaggtccatcatatccagcaccgcgctacccttttcccaacattcagacctttgacccatccagagtccgtttaccaagcccgcagcctaacccggtgtcgaaccagcctcagtttccggcttacatgaatccctatagccagtttgctggtccccaccagttgcaacaacctcctcctcctccatttcagggtcaaacaacatcacaactgagttccgggcaggcaagtagtagcaaggaacctgaggatcaggagaaccaaccaacagcttagttaaagtgtggagctgaaacggatcagttcttcaagcaaattacaactttgaagataaaccagagttgtaacatgtagattttgtctgttaagtttaatgtaagtactttttagttaatgggaaagatactgacaggttgcaaggtggtcagtatttgtgcatcacgcttaagattcctcgatgtggccagtatctcccttttctagcatgtgaggtccctactctctggttctacggagaccaaatgttcgactgattaaacacacaatgacttaccaaaagtacacgcggcccatcctcgtctttatgttccaagtgcgactgtttgtttatttgtaagcatttttcttataataataaaacagctctatcttcgttaaaaaaaa

SEQ ID NO: 717 - protein, 573 aa, Arabidopsis thaliana
MGEDDIVELLWKSGQVVRTSQTQRPSSNTPPSLPPPPILRGSGSGNGEENAPLPLPQPSPPLHHQNLFILEDEMSSWLHHSHPGVTSTPASSVSLPPPPNAPREDDIVELLWQSGQVVGTNQTHRQSYDPPPILRGSGSGRGEENAPLSQPPPHLHQQNLFIQEGEMYSWLHHSYRQNYFCSELLNSTPATHPQSSISLAPRQTIATRRAENFMNFSWLRGNIFTGGRVDEAGPSFSVVRESMQVGSNTTPPSSSATESCVIPATEGTASRVSGTLAAHDLGRKGKAVAVEAAGTPSSGVCKAETEPVQIQPATESKLKAREETHGTEEARGSTSRKRSRTAEMHNLAERRRREKINEKMKTLQQLIPRCNKVESDSVSTLISLLKFQRWMMLSSTSNRYRAKYKYALQNRMCFKPMVQHGKSSYVSSFVEMMSTGQGMMSPMMNAGNTQQFMPHMAMDMNRPPPFIPFPGTSFPMPAQMAGVGPSYPAPRYPFPNIQTFDPSRVRLPSPQPNPVSNQPQFPAYMNPYSQFAGPHQLQQPPPPPFQGQTTSQLSSGQASSSKEPEDQENQPTA

SEQ ID NO: 718 - DNA, 1445 bp, Arabidopsis thaliana
tcgaccttcctaatttccaacctctgttcttagcaatatattttttctccaaaaataattctcagtttgattttcttcttctagctcttaagtatatttctttgttgttatttatcttttaatcctttaatctcatctttgtttatctttaatcaaaacccaaaatttacatgggttcttgaaaatctagaagaaataaaggaaacataacaaaaatagaaagaaaaagaagctaatggtcttaaatatggagtctaccggagaagctgttagatcaaccaccggtaacgacggtggtattacggtggttagatccgacgcgccgtcagatttccacgtagctcaaagatcagaaagctcaaaccaatctcccacctctgtcactcctcctccaccacagccatcgtctcatcacacagctcctccgccgctgcaaatttcgacggtgacgactacgactacgacggccgcgatggaaggtatctccggtggactgatgaagaagaagcgtggacggccaaggaagtatggaccggacgggactgttgtagcgttatctcctaaaccgatttcatcagcgccggcgccgtcgcatcttccgccgccgagttcacacgtcatcgatttctccgcttctgagaaacgtagcaaagtgaaaccaacgaactcgtttaacagaacaaagtatcatcaccaagttgagaatttgggtgaatgggctccttgctccgtcggtggtaatttcacacctcatataatcacagtcaacaccggcgaggatgtaacaatgaagataatctcgttttcgcaacaaggacctcgctctatttgtgttctgtcagcaaacggtgttatttcaagcgttacacttcgtcagccagattcctctggcggcacattgacatacgaaggtcggtttgagatattatcattatccgggtcattcatgcctaatgattcaggcggaacacgaagtagaacgggaggaatgagtgtatcgttagcaagtcccgatggacgtgtagtaggcggtggcctcgccggtttactagtagccgcgagtccggttcaggtggttgtaggaagttttttagcgggcactgaccatcaagatcagaaaccgaaaaagaacaaacatgatttcatgttgtcgagtcctaccgctgcaattcctatctctagtgcagctgatcaccggacaatccattcggtctcgtctcttccggtcaataataatacatggcagacttctttagcttccgatccaagaaacaagcataccgatattaatgtcaatgtaacttgaaatccaatctttctctgtattttctgttaacaagtttgatttggttgtttatctacattaggattttactaaaatggtagtattatttatagggttttagggtctttattttggttccactgttgtcacttgtaggata

SEQ ID NO: 719 - protein, 356 aa, Arabidopsis thaliana
MVLNMESTGEAVRSTTGNDGGITVVRSDAPSDFHVAQRSESSNQSPTSVTPPPPQPSSHHTAPPPLQISTVTTTTTTAAMEGISGGLMKKKRGRPRKYGPDGTVVALSPKPISSAPAPSHLPPPSSHVIDFSASEKRSKVKPTNSFNRTKYHHQVENLGEWAPCSVGGNFTPHIITVNTGEDVTMKIISFSQQGPRSICVLSANGVISSVTLRQPDSSGGTLTYEGRFEILSLSGSFMPNDSGGTRSRTGGMSVSLASPDGRVVGGGLAGLLVAASPVQVVVGSFLAGTDHQDQKPKKNKHDFMLSSPTAAIPISSAADHRTIHSVSSLPVNNNTWQTSLASDPRNKHTDINVNVT

SEQ ID NO: 720 - DNA, 1750 bp, Arabidopsis thaliana
atttatgacttctcaatacaaaaagctcccctcacttttttaagttttgtcttctctaatccgtcttcttctactatcttgcatgtcttgcgtcttttatatacatctctcgtaaaccctagcaaatcatacaaggtcaagaagcttgaccttcattagacttaagcagtttataatcaactaccacgaatagcaatggataaagattactcggcaccaaacttcttaggtgaatcctcaggcggtaacgatgataacagctctggtatgatagactatatgttcaatagaaaccttcaacaacaacaaaagcaatcgatgccacaacagcagcaacatcaactctctccttccggatttggagcaacaccctttgataaaatgaacttctctgatgtgatgcagtttgcggacttcggttcgaaacttgcgttgaaccagaccagaaaccaagacgatcaagaaaccgggattgaccccgtttatttcttgaagttccctgtcttgaacgacaaaatagaggaccataaccaaacccaacatctcatgccttctcatcagacgtctcaagaaggaggtgagtgtggaggaaacataggcaatgtgtttcttgaagaaaaagaagatcaagacgatgacaacgacaacaactccgtgcaactacgttttattggaggagaagaagaagatagggagaacaagaatgttacgaaaaaggaggtgaagagcaagaggaagagagctagaacgagcaagaccagcgaagaagtggaaagccaacggatgactcatatcgcggtcgaaagaaaccgtaggaagcaaatgaatgagcatcttcgtgtccttagatctctcatgcctggctcctacgttcaaaggggagaccaagcgtcaatcataggaggagcaatagagtttgtgagagagctcgagcaactcctacaatgtcttgaatcacagaagcgtcgaagaatcttaggagaaaccggtagggacatgacaacgacaacgacttcttcttcttctcccataactacggtagcgaaccaagcacaaccgctcattattacgggaaatgtaaccgagctagagggcggaggagggcttcgggaggagactgcggagaacaagtcgtgcttggctgacgtggaggtgaagctgctagggtttgacgccatgatcaagatactttcaagaagaaggccgggacagctgattaagactatagctgctttggaggatcttcatctctctattcttcacactaacatcactaccatggaacaaaccgtcctctactcctttaatgtcaagataacaagtgaaacgaggtttacggcagaagacatagcaagttccatccaacagatatttagtttcattcatgcaaataccaacatatctggaagctctaacctgggaaatattgtgtttacttgaaaatcatcacacggcgacaactttgtacactggtgaagattacagtacgtaataatctctacatattgggttttattctccaagcatttggaagagtgtttaagttaaagggagtgcttactttatttttttggggcttttttcatgcaatttaaattttagtgatgattgtgtcgcttgtaatgttagaactcgttgttgtgatttctgctgctttgatttgtaggttttgaacaagcggtttagaatgctaaaccacttatttacttgaaataacttttttcacaaaaaaaaaaaaaaaagaaaaaaa

SEQ ID NO: 721 - protein, 414 aa, Arabidopsis thaliana
MDKDYSAPNFLGESSGGNDDNSSGMIDYMFNRNLQQQQKQSMPQQQQHQLSPSGFGATPFDKMNFSDVMQFADFGSKLALNQTRNQDDQETGIDPVYFLKFPVLNDKIEDHNQTQHLMPSHQTSQEGGECGGNIGNVFLEEKEDQDDDNDNNSVQLRFIGGEEEDRENKNVTKKEVKSKRKRARTSKTSEEVESQRMTHIAVERNRRKQMNEHLRVLRSLMPGSYVQRGDQASIIGGAIEFVRELEQLLQCLESQKRRRILGETGRDMTTTTTSSSSPITTVANQAQPLIITGNVTELEGGGGLREETAENKSCLADVEVKLLGFDAMIKILSRRRPGQLIKTIAALEDLHLSILHTNITTMEQTVLYSFNVKITSETRFTAEDIASSIQQIFSFIHANTNISGSSNLGNIVFT

SEQ ID NO: 722 - DNA, 1216 bp, Arabidopsis thaliana
caagaaccatctcgtaaatcaagatttctccaaggaaaatcagataagtcataatggatctatccctggctccgacaacaacaacaagttccgaccaagaacaagacagagaccaagaattaacctccaacatcggagcaagcagcagctccggtcccagcggaaacaacaacaaccttccgatgatgatgattccacctccggagaaagaacacatgttcgacaaagtggtaacaccaagcgacgtcggaaaactcaacagactcgtgatccctaaacaacacgctgagaggtatttccctctagactcctcaaacaaccaaaacggcacgcttttgaacttccaagacagaaacggcaagatgtggagattccgttactcgtattggaactctagccagagctacgttatgaccaaaggatggagccgtttcgtcaaagagaaaaagctcgatgcaggagacattgtctctttccaacgaggcatcggagatgagtcagaaagatccaaactttacatagattggaggcatagacccgacatgagcctcgttcaagcacatcagtttggtaattttggtttcaatttcaatttcccgaccacttctcaatattccaacagatttcatccattgccagaatataactccgtcccgattcaccggggcttaaacatcggaaatcaccaacgttcctattataacacccagcgtcaagagttcgtagggtatggttatgggaatttagctggaaggtgttactacacgggatcaccgttggatcataggaacattgttggatcagagccgttggttatagactcagtccctgtggttcccgggagattaactccggtgatgttaccgccgcttcctccgcctccttctacggcgggaaagagactaaggctctttggggtgaatatggaatgtggcaatgactataatcaacaagaagagtcatggttggtgccacgtggcgaaattggtgcatcttcttcttcttcttcagctctacgactaaatttatcgactgatcatgatgatgataatgatgatggtgatgatggcgatgatgatcaatttgctaagaaagggaagtcttcactttctctcaatttcaatccatgagaagtttcatcatcttcttgttttgaatctctctttatattgtttccattagtaatttttactaagggtattagattctagctagt

SEQ ID NO: 723 - protein, 358 aa, Arabidopsis thaliana
MDLSLAPTTTTSSDQEQDRDQELTSNIGASSSSGPSGNNNNLPMMMIPPPEKEHMFDKVVTPSDVGKLNRLVIPKQHAERYFPLDSSNNQNGTLLNFQDRNGKMWRFRYSYWNSSQSYVMTKGWSRFVKEKKLDAGDIVSFQRGIGDESERSKLYIDWRHRPDMSLVQAHQFGNFGFNFNFPTTSQYSNRFHPLPEYNSVPIHRGLNIGNHQRSYYNTQRQEFVGYGYGNLAGRCYYTGSPLDHRNIVGSEPLVIDSVPVVPGRLTPVMLPPLPPPPSTAGKRLRLFGVNMECGNDYNQQEESWLVPRGEIGASSSSSSALRLNLSTDHDDDNDDGDDGDDDQFAKKGKSSLSLNFNP

SEQ ID NO: 724 - DNA, 609 bp, Arabidopsis thaliana
atggataacttcaatgttgttgccaatgaagacaatcaagtgaatgatgtgaagcctccaccacccccaccgcgagtgtgtgcaagatgtgattctgataacacaaaattttgttactacaacaattatagtgagtttcaaccgcgctacttctgcaagaactgtcgaagatactggactcatggtggggctttaagaaacgtaccaattggtgggagtagtcgtgccaagcggacaaggataaatcaaccttcagttgctcagatggtttctgttggaatccaaccagggaaccgttttagttctttgtctcatattcatggtggtatggtaacaaatgtgcatccaactcaaacttttcgaccaaatcatcgcctagctttccataatggatcatttgagcaagattattatgatgttgggtctgataatcttttggtaaaccaacaagttggtggatatgttgataatcacaacggttatcacatgaatcaagtggatcaatacaactggaaccagagcttcaataacgctatgaacatgaattataataacgctagcactagcggaaggatgcatcctagtcatttagagaagggtggtccttga

SEQ ID NO: 725 - protein, 202 aa, Arabidopsis thaliana
MDNFNVVANEDNQVNDVKPPPPPPRVCARCDSDNTKFCYYNNYSEFQPRYFCKNCRRYWTHGGALRNVPIGGSSRAKRTRINQPSVAQMVSVGIQPGNRFSSLSHIHGGMVTNVHPTQTFRPNHRLAFHNGSFEQDYYDVGSDNLLVNQQVGGYVDNHNGYHMNQVDQYNWNQSFNNAMNMNYNNASTSGRMHPSHLEKGGP

SEQ ID NO: 726 - DNA, 1368 bp, Arabidopsis thaliana
atggagcagttcaaagagaggaagtttgtttgtaagttctgtagcaagaggtttccttgtgggaaatcacttggaggtcacatcagaactcacatgaatgagaattcagctgattcagatgaagatgaggctgataagctcaagatgattgatgaaaatggtggtcaatctagttatggtctgagagagaatcctaaaaagaacaagaggtttgtggatcacagacagattatggctctgaaacagcagcagcagcagcaacaacttcaagagctgcgtcgttgcagagaatgtggtaaaggttttgtttcttctaaagctctttgtggtcacatggcttgtcactctgagagagagaagattgttatggatagtcaatctgatactgaggcttcttcctctcctatcagaagaagatccaagagagttgttgtgaaacctcaccacaaagctgcttttgtagttggtggtaatggtattatgaatcaatctatttcagcttcttctgatgcttctgagattgagcctgaacaggaggaaatggcaaggtctttgatgatgctttcgagggattctagttttaagaaaggacataactctttggctgagtcatctgacaacaactctgtgattcttgagactaagtcatcttcaggtgagcaggttaagatgttcaatgtgaagaatgttgaagagttatgtaagaagaacaaacttgtagttgataaccagatgaggtctggtgaagaaaatggtgatgttcattatgattcagataattctgactctggctacttcaggaatggaccaaagaagttggactcagatgtttctgttgatgggttctttaggaacaaaacaataatgggatctggatccggattcaacagctccccaacaaaacaagatagggacatgaacagattcaggaaggaatggtataaggaaggagggtcagggtcaggatcaggatcaggtcgttcttctacaaagtatgatctgaggaaaagcaaaagaggttttccttctcatggtcgtaagaaaatcaagtatgagttcactgaatctgtctatgacagtggtgagcatagcttggaaactgactcttgtgcggacacaaacagaactatcaagattcatagtaagtctccaatggttaagaaagcaaacggtgcaaagaagaaaagcaaaggtcacgagtgtccgatttgcttcagggtgttcaaatcaggacaagctttaggaggtcacaagagatcacatttcattgggaatcaagaacacaggactttggtgattcaacatcaagtagctcatgagatgcatacactcatcgatctcaatcttcctgctcctattgatgaatga

SEQ ID NO: 727 - protein, 455 aa, Arabidopsis thaliana
MEQFKERKFVCKFCSKRFPCGKSLGGHIRTHMNENSADSDEDEADKLKMIDENGGQSSYGLRENPKKNKRFVDHRQIMALKQQQQQQQLQELRRCRECGKGFVSSKALCGHMACHSEREKIVMDSQSDTEASSSPIRRRSKRVVVKPHHKAAFVVGGNGIMNQSISASSDASEIEPEQEEMARSLMMLSRDSSFKKGHNSLAESSDNNSVILETKSSSGEQVKMFNVKNVEELCKKNKLVVDNQMRSGEENGDVHYDSDNSDSGYFRNGPKKLDSDVSVDGFFRNKTIMGSGSGFNSSPTKQDRDMNRFRKEWYKEGGSGSGSGSGRSSTKYDLRKSKRGFPSHGRKKIKYEFTESVYDSGEHSLETDSCADTNRTIKIHSKSPMVKKANGAKKKSKGHECPICFRVFKSGQALGGHKRSHFIGNQEHRTLVIQHQVAHEMHTLIDLNLPAPIDE

SEQ ID NO: 728 - DNA, 1540 bp, Arabidopsis thaliana
ggtttttgtgtggattctagcttcaaagtcgatggaccaattacgaggttacaaaaccaactgtggattctcacttgggaaaccgagattcggatctattaaggttaaaatcccaaggatcaaacctgagatagaagaagaccaagtagaagaagatgatgaagctaaaaacatcggtctcgaggaagaggaaaatgatcatgaagctaagagtatggatctagagcaaggagatgtggaagaagaagaaggagaagagaaaaaacatatatgttgtgaatgtggtaaaaggtttgtgtcaggtaaagctttaggaggtcataaacggattcatgtgctcgaaactcgtaaattctcaatgatgagaccaaagatggtgtctggtatggttggtagatctgaaagaggtgacttagaagtggcttgttgtgtttgttacaagaagtttacatcaatgaaggctttatatggacacatgaggtttcatccagacagaggttggaaaggtgttttgcctcctcctcctcttcttcctcatccacttggtaattcatcgtcttctacacttgatcatgatgatgagtttataagctcagattatgatgatgatgatgattttgatgatgatgatgatgatgatgatgatgagaactcggagttatgggacagtaatttggaattggaaaacgttgttgaatcgattaaaggatggtcaacaaaagggaagagaggaaggagaggtgatttgaagtttgatgaagcagatttgaaggatccacctttagaagatgtgaaggatattgatgatgctaatggtctattgttcttagctactactgcagaagcagctgctaatcttaatgttgctgagacttctgcttcgcgttccgttgaagagaaatatctggaaatggtcaagaagaggaagaagaagcagaagagattgtctgagatggagaaagagtcatcaacatctactcatcatgatcatcagcttgatcaggttgttgttgttgcagctgaggaaggtggtggtgccggtgcacgtgagaagcacgtgtgtgtgacttgcaacaagtcgtttagttcttatcaagctttaggaggtcatagagcaagtcacaacaaggtcaagatattggagaatcatcaagctagggcaaacgctgaagcttcattacttggaactgaagcaataataaccggtttagctagtgctcaaggaacaaacacatctttaagcagtagtcataatggagatcatgtttgtaatatatgtcacaaaagcttctcaacaggtcaagctcttggtggtcacaagagatgtcattggactgcaccagtttctactgtggctccaaccacggttccaaccgctgctccaaccgttccagcaactgcgtcttctagtcaagtaacagagacagtacaagaggtgaagaaattgaagagaagagttttggagtttgacttgaatgagttgccacctaacgaagaagaagaaagagtctaagagacgtatatatgcaagcaagtaatc

SEQ ID NO: 729 - protein, 493 aa, Arabidopsis thaliana
MDQLRGYKTNCGFSLGKPRFGSIKVKIPRIKPEIEEDQVEEDDEAKNIGLEEEENDHEAKSMDLEQGDVEEEEGEEKKHICCECGKRFVSGKALGGHKRIHVLETRKFSMMRPKMVSGMVGRSERGDLEVACCVCYKKFTSMKALYGHMRFHPDRGWKGVLPPPPLLPHPLGNSSSSTLDHDDEFISSDYDDDDDFDDDDDDDDDENSELWDSNLELENVVESIKGWSTKGKRGRRGDLKFDEADLKDPPLEDVKDIDDANGLLFLATTAEAAANLNVAETSASRSVEEKYLEMVKKRKKKQKRLSEMEKESSTSTHHDHQLDQVVVVAAEEGGGAGAREKHVCVTCNKSFSSYQALGGHRASHNKVKILENHQARANAEASLLGTEAIITGLASAQGTNTSLSSSHNGDHVCNICHKSFSTGQALGGHKRCHWTAPVSTVAPTTVPTAAPTVPATASSSQVTETVQEVKKLKRRVLEFDLNELPPNEEEERV

SEQ ID NO: 730 - DNA, 867 bp, Arabidopsis thaliana
atggagagttacaagtgcagggtttgctttaagagcttcgttaacggaaaagctttaggtggtcacatgagatctcacatgagtaattcacatgaggaagaacaaaggccgagtcaactcagttatgagactgagtccgatgtttcttcgtctgatccgaagtttgcttttacgagctctgttcttcttgaagacggtgaaagcgagagcgagtcgtcgaggaatgttattaacctgactcggaaacgatccaagcgaactcggaaactcgattcgtttgtaaccaagaaggtgaaaacgagtcaactcggatacaagcctgagtctgatcaagagcctcctcatagctcagcttctgatacaacgacggaggaagatcttgccttttgtctcatgatgctctctcgagataaatggaagaagaacaaaagtaataaagaagtagtggaagagatcgagacagaagaagaatcagaaggttacaacaagattaatcgagcaacaacgaaaggaagatacaagtgtgagacctgcgggaaagtgttcaaatcttatcaagcattaggtgggcatagagcaagtcataagaagaacagagtaagtaacaacaaaacagagcaacgaagcgaaacagagtatgataatgttgttgttgttgctaagagaatccatgaatgtccgatttgtctaagagttttcgcatcgggacaagcacttggaggtcacaaaagatctcacggggtagggaatttatctgtgaatcaacaacgtcgagttcatagaaacgagtctgtgaaacagaggatgatagatcttaatcttcctgcaccaaccgaagaagacgaagtctctgtggtgtttcaatga

SEQ ID NO: 731 - protein, 288 aa, Arabidopsis thaliana
MESYKCRVCFKSFVNGKALGGHMRSHMSNSHEEEQRPSQLSYETESDVSSSDPKFAFTSSVLLEDGESESESSRNVINLTRKRSKRTRKLDSFVTKKVKTSQLGYKPESDQEPPHSSASDTTTEEDLAFCLMMLSRDKWKKNKSNKEVVEEIETEEESEGYNKINRATTKGRYKCETCGKVFKSYQALGGHRASHKKNRVSNNKTEQRSETEYDNVVVVAKRIHECPICLRVFASGQALGGHKRSHGVGNLSVNQQRRVHRNESVKQRMIDLNLPAPTEEDEVSVVFQ

SEQ ID NO: 732 - DNA, 513 bp, Arabidopsis thaliana
atggttgctgaaagtgataatcgtgatctgacggtggatacggcggcgagctgtctgatgttgttatcaggaattggagaacacgacggaagaaagaaacgtgttttccgatgcaagacttgtgagagagacttcgattcgttccaagctttaggaggccaccgtgcaagccactcgaaactaaccaacagtgacgataaatcacttcctggatcaccaaagaagaagcctaaaactacgactacgacgacggctcatacttgtccgatttgtggcttggagtttccgatgggacaagctcttggtggtcacatgaggaaacataggaacgagaaagaacgagaaaaggcttctaacgtattggttacgcattctttcatgccggagacgacaacggtgacgactttgaagaaatcgagtagtgggaagagagtggcgtgtttggatttcgacttaacttcggtggagagctttgtcaacacggaattggagttgggaagaacgatgtactga

SEQ ID NO: 733 - protein, 170 aa, Arabidopsis thaliana
MVAESDNRDLTVDTAASCLMLLSGIGEHDGRKKRVFRCKTCERDFDSFQALGGHRASHSKLTNSDDKSLPGSPKKKPKTTTTTTAHTCPICGLEFPMGQALGGHMRKHRNEKEREKASNVLVTHSFMPETTTVTTLKKSSSGKRVACLDFDLTSVESFVNTELELGRTMY

SEQ ID NO: 734 - DNA, 1152 bp, Arabidopsis thaliana
atgactgatccttattccaatttcttcacagactggttcaagtctaatccttttcaccattaccctaattcctccactaacccctctcctcatcctcttcctcctgttactcctccctcttccttcttcttcttccctcaatccggagacctccgccgtccaccgccgccaccaactcctcctccttctcctcctctccgagaagccctccctctcctcagcctcagccccgccaacaaacaacaagaccaccatcacaaccatgaccaccttattcaagaaccaccttcaacctccatggatgtcgactacgatcatcaccatcaagatgatcatcataacctcgatgacgatgaccatgacgtcaccgttgctcttcacataggccttccaagccctagtgctcaagagatggcctctttgctcatgatgtcttcttcttcctcttcctcgaggaccactcatcatcacgaggacatgaatcacaagaaagacctcgaccatgagtacagccacggagctgtcggaggaggagaagatgacgatgaagattcagtcggcggagacggcggctgtagaatcagcagactcaacaagggtcaatattggatccctacaccttctcagattctcattggccctactcagttctcatgtcctgtttgcttcaaaaccttcaacagatacaataacatgcagatgcatatgtggggacatggatcacaatacagaaaaggacctgaatctctaaggggaacacaaccaacaggaatgctaaggcttccgtgctattgctgcgccccaggctgtcgcaacaacattgaccatccaagggcaaagcctctcaaagacttcagaacccttcaaacacattacaagagaaaacatgggatcaaacctttcatgtgtaggaaatgtggaaaggctttcgcagtccgaggggactggagaacacatgagaagaattgtggcaaactttggtattgcatatgtggatctgatttcaagcacaagagatctctcaaagatcacatcaaggcttttgggaatggtcatggagcctacggaattgatgggtttgatgaagaagatgagcctgcctctgaggtagaacaattagacaatgatcatgagtcaatgcagtctaaatag

SEQ ID NO: 735 - protein, 383 aa, Arabidopsis thaliana
MTDPYSNFFTDWFKSNPFHHYPNSSTNPSPHPLPPVTPPSSFFFFPQSGDLRRPPPPPTPPPSPPLREALPLLSLSPANKQQDHHHNHDHLIQEPPSTSMDVDYDHHHQDDHHNLDDDDHDVTVALHIGLPSPSAQEMASLLMMSSSSSSSRTTHHHEDMNHKKDLDHEYSHGAVGGGEDDDEDSVGGDGGCRISRLNKGQYWIPTPSQILIGPTQFSCPVCFKTFNRYNNMQMHMWGHGSQYRKGPESLRGTQPTGMLRLPCYCCAPGCRNNIDHPRAKPLKDFRTLQTHYKRKHGIKPFMCRKCGKAFAVRGDWRTHEKNCGKLWYCICGSDFKHKRSLKDHIKAFGNGHGAYGIDGFDEEDEPASEVEQLDNDHESMQSK

SEQ ID NO: 736 - DNA, 609 bp, Arabidopsis thaliana
ctcctttattctacggaagaaatctatatattctatatatggaaaacatcaaaaaccctaaaaacgcagatgattgttccgatagcatatcaaaaaacagtcatcaaggcgttgatgattccctgaaccagtcaagatcttacgtatgcagtttctgcataaggggcttctcgaatgctcaagcactaggagggcatatgaacatccacagaagagacagggctaaactcagacaaaagcttatggaagataataaggatgatgtcgtcgccgagagtgatgcatccgaagttgtgtctctagaccttaatgaacaacaacaacaacaaggagaagctttgacatgtgatgatcacgatcaatatgttgataacgatataagtcctaaacagaaattagagttttgggttcaagaaagcaagcttgatactaatgatcatggaaaggtcacggaggctagcatagatggttcgagttcgagtcatcatcgtgatattgaagtattggatctcgagcttcggttaggccaaagcgtcgtaaagaagaagacaacatagtctctgaacgatgaatcatatattgattgcattgtatcaatgggaaaatccc

SEQ ID NO: 737 - protein, 172 aa, Arabidopsis thaliana
MENIKNPKNADDCSDSISKNSHQGVDDSLNQSRSYVCSFCIRGFSNAQALGGHMNIHRRDRAKLRQKLMEDNKDDVVAESDASEVVSLDLNEQQQQQGEALTCDDHDQYVDNDISPKQKLEFWVQESKLDTNDHGKVTEASIDGSSSSHHRDIEVLDLELRLGQSVVKKKTT

SEQ ID NO: 738 - DNA, 909 bp, Arabidopsis thaliana
atgtataataataaccaatatagcttctccggtgacgaagactccgtcgtcctcagccttggacctcctggccaacaataccctagccataacaaacctaccagtactaaaccttcttctgatcatgagtttaatcacccattaacaaaccctaatggtgttaccgttgctcttcatatcggtcctccgagttccgacaaagaaacccttagcggcgggaacaaccaagagggtttaacggcgaggcagggacagtattggatcccttcactttcgcagatccttgtcggtcccactcagttctcttgttctgtctgtaacaaaactttcaaccgcttcaacaacatgcagatgcatatgtggggtcatggttcgcaataccgaaaaggcccagagtcgctcagagggacgaagtcgtcatcttcgatactaaggctgccatgttactgttgtgctgaaggttgtaagaacaacatagaccatccaagatcaaagcctctcaaagactttagaacgcttcaaacgcattacaagcggaagcacggagcaaaaccttttcgttgccgcaagaaatgtgaaaaaacgtttgcggtgagaggcgattggagaacgcatgagaaaaattgtgggaagttgtggttttgcgtttgcgggtcagattttaagcataagaggtcacttaaggatcacgttagggctttcggtgatggtcatgcggctcacactgtaagtgatcgggttgtaggcattggggacgcagatgaagatgatgaggaggaggaagaagaggaagaagatgatgtagaagaagaagatgctcatgaagaaaatgttcgtggagagaagaactatgggattagatatgatcactttcgtcgttatggtcagatttctgatgacaattactaa

SEQ ID NO: 739 - protein, 302 aa, Arabidopsis thaliana
MYNNNQYSFSGDEDSVVLSLGPPGQQYPSHNKPTSTKPSSDHEFNHPLTNPNGVTVALHIGPPSSDKETLSGGNNQEGLTARQGQYWIPSLSQILVGPTQFSCSVCNKTFNRFNNMQMHMWGHGSQYRKGPESLRGTKSSSSILRLPCYCCAEGCKNNIDHPRSKPLKDFRTLQTHYKRKHGAKPFRCRKKCEKTFAVRGDWRTHEKNCGKLWFCVCGSDFKHKRSLKDHVRAFGDGHAAHTVSDRVVGIGDADEDDEEEEEEEEDDVEEEDAHEENVRGEKNYGIRYDHFRRYGQISDDNY

SEQ ID NO: 740 - DNA, 1301 bp, Arabidopsis thaliana
cagatctggtaccgtcgacccgattgatcaattccaatattacgtcctttttttcttgaatctctctatatactcaatggaagcagctgcggaggctgtatcagccgctagggagcaatcattgatccttaaagggaaacggactaagcggcaacgtcctcagtccccaatccctttctctatcattcctcctatgtcttcgcatgaaccggatgctgaagaagagtctactagtcttgtttccaaggagaagagtctcaatgatgaaatcaacaacaataacatcaagaataataacaatactttgatcaatggtgttacatcttcatcttctgcctcttcatcttccaacaacaatgccacattaaaggccacggctgacgaagaagatcaagatatggctaattgtttgatcctcctcgcccaaggtcactctcttccccacctccaaccgcaaccgcacccccaacaacaaacaagacagcttatgatgagttaccaagattccggtaacaacaacaacaatgcgtatagatctagcagcaggaggtttctagagacatcttcatctaacgggaccacaacgaacggtggtggaggcagagccggttactatgtttaccagtgcaaaacatgtgaccggacttttccgtctttccaagctcttggtgggcatagagccagccacaagaagcctaaagccgctatgggtcttcactctaaccatgaccacaagaagtctaactacgatgacgccgtttctctccatctcaacaacgttctcaccacaactcctaacaacaatagtaaccatagatcgcttgtggtatacggcaaaggtagtaataataaggtccatgaatgtgggatatgtggagccgaattcacatccgggcaagcattaggtggtcacatgagacgccatagaggtgcagtggtagccgcagcagccgcctctaccgccaccgtatcggttgcggccattccggctactgcaaacacggctttgtcattgtcgccaatgtcgtttgatcagatgtcggagggtccaattcaggctcccgttaagagagcgaggagcgcggttgtgtcgttagatttagatctgaatctacctgccccggaagatgagaatcgggtcaacggattaagctttgcttcaaagcaagaacacgaacaagaacatgaacaaacacaacagaagaaacagagagaagaacaaaagtctcttgtcttgtcttctgctcctacattggtggattgccattactaaaatcaaaattcattaatacctaatcaaa

SEQ ID NO: 741 - protein, 398 aa, Arabidopsis thaliana
MEAAAEAVSAAREQSLILKGKRTKRQRPQSPIPFSIIPPMSSHEPDAEEESTSLVSKEKSLNDEINNNNIKNNNNTLINGVTSSSSASSSSNNNATLKATADEEDQDMANCLILLAQGHSLPHLQPQPHPQQQTRQLMMSYQDSGNNNNNAYRSSSRRFLETSSSNGTTTNGGGGRAGYYVYQCKTCDRTFPSFQALGGHRASHKKPKAAMGLHSNHDHKKSNYDDAVSLHLNNVLTTTPNNNSNHRSLVVYGKGSNNKVHECGICGAEFTSGQALGGHMRRHRGAVVAAAAASTATVSVAAIPATANTALSLSPMSFDQMSEGPIQAPVKRARSAVVSLDLDLNLPAPEDENRVNGLSFASKQEHEQEHEQTQQKKQREEQKSLVLSSAPTLVDCHY

SEQ ID NO: 742 - DNA, 1260 bp, Arabidopsis thaliana
atgatagactacgagagaagcaataccaccaagaacatcaacacccatcatcacaaccctcctccatcttcatcttcctctgatcttcttcccgacggtaatggaaccgccgtgactcagaagcggaaacggagacccgccgggacaccggatccggaggcggaggtggtatctttatcaccaagaacgttactagaatcggatcggtacgtatgtgagatctgtaaccaagggtttcaaagggaccagaatctacagatgcatagaagacgacataaagttccatggaagcttcttaaaagagagaccaacgaggaagtgaggaaaagagtctacgtctgtccggagccgacatgtctccaccacaacccttgccacgcgctcggagatctcgtgggaatcaagaaacacttccgacggaaacatagtaaccacaagcaatggatctgcgagcgatgctcaaaaggctacgcagttcaatctgattacaaagctcatctcaaaacctgtggcactcgcggccactcctgtgactgcggccgagttttttccagagtggaaagtttcatagagcaccaagacacttgcaccgtacgccgatcccaaccctccaaccaccgtttacatgagcagcaacaacataccacaaacgctacacaaaccgcttcaaccgcggaaaacaacgagaacggggacctctccattggtcctatattgcctggacatcctttacaaagaagacaatccccaccgtcggaacaacaaccatccactttgctctatcccttcgttactaatggtagtatcgagcttcagctacttccatcgaggaattgtgctgatgagaccagccttagtctgtctatagggacaatggatcaaaagacaatgtcggaagttgagaagaagagctacgagaagggagaaacgagcctagaaagagaggaggcgagaagagaaacaaagaggcagatcgaaatcgcggaattggagtttgctgaagccaagagaataaggcaacatgcgagagctgagcttcacaaagctcatctttttagagaagaagcaagtaggaggattagtgcaacgatgatgcaaataacttgccacaattgcaagcaacattttcaagctccggctgctttggttcctcctcctcctcagacgcattgtaccgatgagagcacgtctctggccgtgagctacatgtcttcggcgactaccgaaggagaaaaggcgagtgatagagcatcttcatag

SEQ ID NO: 743 - protein, 419 aa, Arabidopsis thaliana
MIDYERSNTTKNINTHHHNPPPSSSSSDLLPDGNGTAVTQKRKRRPAGTPDPEAEVVSLSPRTLLESDRYVCEICNQGFQRDQNLQMHRRRHKVPWKLLKRETNEEVRKRVYVCPEPTCLHHNPCHALGDLVGIKKHFRRKHSNHKQWICERCSKGYAVQSDYKAHLKTCGTRGHSCDCGRVFSRVESFIEHQDTCTVRRSQPSNHRLHEQQQHTTNATQTASTAENNENGDLSIGPILPGHPLQRRQSPPSEQQPSTLLYPFVTNGSIELQLLPSRNCADETSLSLSIGTMDQKTMSEVEKKSYEKGETSLEREEARRETKRQIEIAELEFAEAKRIRQHARAELHKAHLFREEASRRISATMMQITCHNCKQHFQAPAALVPPPPQTHCTDESTSLAVSYMSSATTEGEKASDRASS

SEQ ID NO: 744 - DNA, 936 bp, Arabidopsis thaliana
atgcaaagcaagaacatgatcgtggcttcatctcatcagcagcaacaacaacagcaaccgcagcagccacaaccgcaacttaaatgccctcgttgcgattcttccaacacaaagttctgctactacaacaactacagcctctctcaaccacggcacttttgcaaggcttgcaagaggtactggacgagaggtgggactctcaggaacgttcccgtagggggtagctaccggaagaacaaacgtgtaaagcggccatcaaccgcaaccacaaccactgcctccaccgtctcgacgactaattcttcatcccctaataaccctcatcagatctctcatttctcttccatgaatcatcatcctttgttctatggtttatcagatcatatgagcagttgtaataataatcttccaatgatcccaagccgtttcagtgattcttcaaagacttgttcatcaagtggtttagagagtgagtttctctcatctggttttagcagtcttagtgctcttggattagggcttccgcatcagatgagtcatgaccacaccattaatggtagcttcatcaacaactccacaacaaacaaaccctttcttctatcgggtctattcggatcctcgatgtcttcttcttctactcttctccagcacccacataaacccatgaacaatggtggtgacatgttgggacaatcccatctccaaaccctagcatcacttcaagatttgcatgttggaggtaacaatgaagatatgaagtacaaagaaggaaagcttgatcagatctctgggaacatcaatgggttcatgtcatcatcatcatctttggatccttcaaactacaacaacatgtggaataatgcaagtgttgtcaatggagcatggcttgatccaacaaataataacgttggatcctccctcacctctttgatataa

SEQ ID NO: 745 - protein, 311 aa, Arabidopsis thaliana
MQSKNMIVASSHQQQQQQQPQQPQPQLKCPRCDSSNTKFCYYNNYSLSQPRHFCKACKRYWTRGGTLRNVPVGGSYRKNKRVKRPSTATTTTASTVSTTNSSSPNNPHQISHFSSMNHHPLFYGLSDHMSSCNNNLPMIPSRFSDSSKTCSSSGLESEFLSSGFSSLSALGLGLPHQMSHDHTINGSFINNSTTNKPFLLSGLFGSSMSSSSTLLQHPHKPMNNGGDMLGQSHLQTLASLQDLHVGGNNEDMKYKEGKLDQISGNINGFMSSSSSLDPSNYNNMWNNASVVNGAWLDPTNNNVGSSLTSLI

SEQ ID NO: 746 - DNA, 1677 bp, Arabidopsis thaliana
aatgtcggttgtacaattatttgtcactaaagtttccaaatttcttctaaactgatgaatcaatggaacatgatgacgaaaaagataaatccacggtggcgggaactgacccacccatttccaccgcctctctattccccagatttttttcaattatctgactacagtttgtcggttacttccttccctaaacctttataaaccattaaacctctcatccttcttctcttaaaccccctaattatcacacacaccccaatttctcactctctctctcactaaaacccgtaaattttctactatatcaaatgagcccaaaaaaagatgctgtttctaaaccaactccaatttcagtacccgtttcgagacgatccgatatacccgggtctctctacgtcgacactgacatgggtttctctgggtcaccacttcccatgccactagacatcttacaagggaatccaattccaccttttttatccaagacttttgatttggttgatgacccgactcttgacccggtcatctcttggggactgaccggagctagcttcgtagtttgggatcctctagagtttgccagaatcatacttccaaggaatttcaaacacaacaatttctccagcttcgtcagacagcttaacacttatggatttcgaaagattgatactgacaagtgggaattcgctaacgaggctttccttagaggcaagaagcatcttctgaagaacattcatcgtcgtcgatcaccacaatccaaccaaacttgctgcagtagcactagccaaagccaagggtcacctactgaggttggaggagagattgagaagctgaggaaagagcggcgtgcattgatggaggaaatggttgagcttcagcagcaaagcagaggcacagctcgacatgtggacactgtaaaccagaggctgaaagctgcagagcaacgtcagaagcaattgctctctttcttggctaagttgtttcagaaccggggtttcttggaacgcctgaagaacttcaaaggaaaagaaaaaggaggagctcttggattggaaaaggcgagaaagaagttcatcaagcaccaccagcagcctcaagattctccaacaggaggggaggtggtgaagtatgaagctgatgattgggagagattgctaatgtatgacgaagagactgagaacaccaagggtttaggagggatgacttcaagcgatccaaaaggcaagaacttgatgtatccatcagaagaagagatgagcaaaccagattacttgatgtccttcccatctcctgaaggacttattaaacaagaagagacgacatggagcatgggtttcgatactacaataccgagtttcagcaacaccgatgcatggggaaacacaatggactataatgatgtctcagagtttggttttgctgcagaaacaacaagtgatggtttgcctgatgtctgctgggaacaatttgctgcaggaatcacagagactggattcaactggccaactggtgatgatgatgataatacgccaatgaatgatccttaggatcttttcatatatagtttagaccaaaaacccgtttcttatcgggtgaactattaattcattattcattttgaatgcactctttatacatatatataatattgatgagtttgattgttccaaaaaaaaa

SEQ ID NO: 747 - protein, 412 aa, Arabidopsis thaliana
MSPKKDAVSKPTPISVPVSRRSDIPGSLYVDTDMGFSGSPLPMPLDILQGNPIPPFLSKTFDLVDDPTLDPVISWGLTGASFVVWDPLEFARIILPRNFKHNNFSSFVRQLNTYGFRKIDTDKWEFANEAFLRGKKHLLKNIHRRRSPQSNQTCCSSTSQSQGSPTEVGGEIEKLRKERRALMEEMVELQQQSRGTARHVDTVNQRLKAAEQRQKQLLSFLAKLFQNRGFLERLKNFKGKEKGGALGLEKARKKFIKHHQQPQDSPTGGEVVKYEADDWERLLMYDEETENTKGLGGMTSSDPKGKNLMYPSEEEMSKPDYLMSFPSPEGLIKQEETTWSMGFDTTIPSFSNTDAWGNTMDYNDVSEFGFAAETTSDGLPDVCWEQFAAGITETGFNWPTGDDDDNTPMNDP

SEQ ID NO: 748 - DNA, 1307 bp, Arabidopsis thaliana
gccgtctcgacgaatatgctctaccaatgtctgacgaccaattccatcacccgccgcctccttcttcaatgaggcaccgttctacgtcggatgcggcggacggcggctgcggcgagattgttgaggtgcaaggtggtcacattgttcggtctaccggaagaaaagaccgccacagcaaagtctgcacggctaaagggccacgtgaccggcgcgtgagactctctgctcacacggcgattcagttttacgatgttcaagacaggcttggtttcgaccgacctagcaaagccgttgattggcttatcaaaaaggctaagacttccattgacgagctcgctgagcttcctccctggaatcccgccgatgcaattcgcctagccgctgctaacgctaaacccagaagaaccaccgccaaaacccaaatctctccgtctccgccaccgccgcaacagcaacaacaacaacaacagcttcagttcggtgttggcttcaacggaggaggagcagagcatccgagtaacaacgagtcgagttttctcccgccgtcaatggattcagattcgatagctgacactataaagtcgttttttccggtgattggctcttcaacggaggctccttcgaatcataaccttatgcacaactatcatcatcagcatccgccggatttgctttctcgaactaatagccaaaaccaagatctccgtctctcgctgcaatcgttcccggatggtccaccgtcgcttctgcaccaccaacatcaccaccacacctctgcttccgcctccgagcctactctgttctacggacagagcaatccgttagggtttgacacatcgagttgggagcagcagtcgtcggaattcggaaggattcagagactagtggcttggaacagcggcggtggcggcggagcaaccgatacaggaaacggaggagggtttctgttcgctcctcctactccttcaacgacgtcgtttcagccagttcttggccaaagccaacagctttattctcagaggggtccccttcagtccagttacagtcccatgatccgtgcttggtttgatcctcaccatcatcaccaatccatctccaccgacgatctcaaccaccaccatcaccttcctccaccggttcaccaatcagcaatccccggaatcggattcgcctcaggtgaattctcttcgggttttcgcataccagcacggtttcagggccaagaagaggagcagcacgacggtctcactcacaagccgtcctctgcttcctctatttctcgccattgacaatcgaaactaatcctc

SEQ ID NO: 749 - protein, 420 aa, Arabidopsis thaliana
MSDDQFHHPPPPSSMRHRSTSDAADGGCGEIVEVQGGHIVRSTGRKDRHSKVCTAKGPRDRRVRLSAHTAIQFYDVQDRLGFDRPSKAVDWLIKKAKTSIDELAELPPWNPADAIRLAAANAKPRRTTAKTQISPSPPPPQQQQQQQQLQFGVGFNGGGAEHPSNNESSFLPPSMDSDSIADTIKSFFPVIGSSTEAPSNHNLMHNYHHQHPPDLLSRTNSQNQDLRLSLQSFPDGPPSLLHHQHHHHTSASASEPTLFYGQSNPLGFDTSSWEQQSSEFGRIQRLVAWNSGGGGGATDTGNGGGFLFAPPTPSTTSFQPVLGQSQQLYSQRGPLQSSYSPMIRAWFDPHHHHQSISTDDLNHHHHLPPPVHQSAIPGIGFASGEFSSGFRIPARFQGQEEEQHDGLTHKPSSASSISRH

SEQ ID NO: 750 - DNA, 1766 bp, Arabidopsis thaliana
caacgatgaacggtcgtggaaatatgactcaataccagcagaatcctttcagtactgatgatggtggccagagcaccggcgtgtcactctcttcccggacttctctgtcaccaccactgatccgttatccagccgggtcgccggacttcagccccggaccacggtgtacgactcaaccgtcccctaccttctccgacttcactcaagcgagtccttcactgacgtcattcaataatccggcaagctttacaccttcgtttagcttctccaacattcaccaaatgattcctacgccgtcgtcgtcccataactcaaaggcgtcggtgagctctgcttcgtcgtctagcttctactttccccagacgagtccttcatcatgctctactccgtcgtcgttcagtccagactcgttttctcactccaacaccggaccatggtcgatccctcagccttcccctgtgttctcatccatagcaccggccagttctgctctgtcgtcgttcggtccagactcattttctcactccaacaccggaacatggtcgatccctcagccttcccctgtgttctcatccatagcaccggccagctctgctccgccgttgttcggtcgtgattcatttccccgctccaaccgcggaaaagggtcgttgattcataggtcgcctgtgctttcggtcttaccgccggcgcctgtctactcctctaatccgatggtgagatcatctccgccgggtcacccatctccatcagcacatttggaggaaatgtctaaccgtcccccgttgcatcctcagcctcgggttccagtcacgaggtccaactctgcgaaagtctccggtagcaggcctagaaagtatcataaaaggaccaacagtgagctatcaagtatgttggttggggactcaagccgcggcgaggaaggcggatttggaaagctcatatataatgaggaagcaatgaaggaattctgctctgagtatatgatcatgcctaaccaaagtgctgttaacaatagtgatcagaatcggaatgctgatgttttgatgataaccaatactgattcgggaggtgcaaatgatgctaagaaatataaaagaatgttggcaaaccgagcctcagctgcacgttctaaggagaatcgggaaaagaagattcgtgatatggaactcagagtagaaactcttgaaaacactcaagcttcactgtttggaacgatgacacttttggagaaggaaaacatagtgatgatgaacgagaataagttagcgaagattcgacttcaattactagagcaacaggcccctcttcttactgctttcattttttttgtttttgtagctttaactaaacaattagatgaactccgaaggctagaaaaggaggcaaatgaacgagggagtgtcgactattctcaactactgaaacaactgaaacaaagtgaagagctccttgctgaaatcaaccgatttaaagtagcaactggtcaggggatgaaaaatcccaaccagttcgagggttcaaccatgcatcaatcggaccaaaacgtgttccagccgcaactcaacacctatgagttcaatcagcaccagcaattggacccaaacatattcaaagagcaatgcaatgtcaacgagtttaatcatgagcaaccaaaccatgaattttatggacataactaaaggattaaacatgtcttcaagttgttttagatttatctatatatgattataaatttgtaaccgtgagagggttcagacaatatg

SEQ ID NO: 751 - protein, 558 aa, Arabidopsis thaliana
MNGRGNMTQYQQNPFSTDDGGQSTGVSLSSRTSLSPPLIRYPAGSPDFSPGPRCTTQPSPTFSDFTQASPSLTSFNNPASFTPSFSFSNIHQMIPTPSSSHNSKASVSSASSSSFYFPQTSPSSCSTPSSFSPDSFSHSNTGPWSIPQPSPVFSSIAPASSALSSFGPDSFSHSNTGTWSIPQPSPVFSSIAPASSAPPLFGRDSFPRSNRGKGSLIHRSPVLSVLPPAPVYSSNPMVRSSPPGHPSPSAHLEEMSNRPPLHPQPRVPVTRSNSAKVSGSRPRKYHKRTNSELSSMLVGDSSRGEEGGFGKLIYNEEAMKEFCSEYMIMPNQSAVNNSDQNRNADVLMITNTDSGGANDAKKYKRMLANRASAARSKENREKKIRDMELRVETLENTQASLFGTMTLLEKENIVMMNENKLAKIRLQLLEQQAPLLTAFIFFVFVALTKQLDELRRLEKEANERGSVDYSQLLKQLKQSEELLAEINRFKVATGQGMKNPNQFEGSTMHQSDQNVFQPQLNTYEFNQHQQLDPNIFKEQCNVNEFNHEQPNHEFYGHN

SEQ ID NO: 752 - DNA, 845 bp, Arabidopsis thaliana
accacaaaacagagcaacacacaacacaaagcttcatttcaattctgtttcgagaaccctttgagaaccagatcggagatggaaaacgacgatatcaccgtggcggagatgaagccaaagaagcgtgctggacggaggattttcaaggagacacgtcacccaatctacagaggcgtgcggcgtagggacggcgacaaatgggtatgcgaagtccgtgaaccgattcatcagcgtcgagtctggctcggaacttatccgacggcagatatggccgcacgtgctcacgacgtggcggttcttgctctgcgcgggagatccgcgtgtttgaatttctccgattctgcttggaggttgccggtgccggcatccactgatccggacacgatcaggcgcacggcggccgaagcagcggagatgttcaggccgccggagtttagtacaggaattacggttttaccctcagccagtgagtttgacacgtcggatgaaggagtcgctggaatgatgatgaggctcgcggaggagccgttgatgtcgccgccaagatcgtacattgatatgaatacgagtgtgtacgtggacgaagaaatgtgttacgaagatttgtcactttggagttactaaaatacgtatgtgttaaaaaaccaaagatcgtatgtgtatgtatgcataataaatgggcttaatgatgggcatagatatgataggtccagcctatatgttaaatgtgttttattttttggtttatctagtttcctaggtatttaccaaattgtattagtataagttttattaagaaataatcaaaaatgttgttgccaaaaaaaaaaaaaaaaaaaaaaaaa

SEQ ID NO: 753 - protein, 181 aa, Arabidopsis thaliana
MENDDITVAEMKPKKRAGRRIFKETRHPIYRGVRRRDGDKWVCEVREPIHQRRVWLGTYPTADMAARAHDVAVLALRGRSACLNFSDSAWRLPVPASTDPDTIRRTAAEAAEMFRPPEFSTGITVLPSASEFDTSDEGVAGMMMRLAEEPLMSPPRSYIDMNTSVYVDEEMCYEDLSLWSY

SEQ ID NO: 754 - DNA, 640 bp, Arabidopsis thaliana
ataacaaactcatcaaacttcctcagcgtttctttttcttacataaacaatttttcttacataaacaaatcttgttgtttgttgttgtcatggcaccgacagttaaaacggcggccgtcaaaaccaacgaaggtaacggagtccgttacagaggagtgaggaagagaccatggggacgttacgcagccgagatcagagatcctttcaagaagtcacgtgtctggctcggtactttcgacactcctgaagaagccgctcgtgcctacgacaaacgtgctattgagtttcgtggagctaaagccaaaaccaacttcccttgttacaacatcaacgcccactgcttgagtttgacacagagcctgagccagagcagcaccgtggaatcatcgtttcctaatctcaacctcggatctgactctgttagttcgagattcccttttcctaagattcaggttaaggctgggatgatggtgttcgatgaaaggagtgaatcggattcttcgtcggtggtgatggatgtcgttagatatgaaggacgacgtgtggttttggacttggatcttaatttccctcctccacctgagaactgattaagatttaattatgattattagatataattaaatgtttctgaattgag

SEQ ID NO: 755 - protein, 166 aa, Arabidopsis thaliana
MAPTVKTAAVKTNEGNGVRYRGVRKRPWGRYAAEIRDPFKKSRVWLGTFDTPEEAARAYDKRAIEFRGAKAKTNFPCYNINAHCLSLTQSLSQSSTVESSFPNLNLGSDSVSSRFPFPKIQVKAGMMVFDERSESDSSSVVMDVVRYEGRRVVLDLDLNFPPPPEN

SEQ ID NO: 756 - DNA, 765 bp, Arabidopsis thaliana
aatcactctacaaagcctgtacgtacacaacaacattaccatggtgaaacaagaacgcaagatccaaaccagcagcacaaaaaaggaaatgcctttgtcatcatcaccatcttcttcttcttcttcatcttcttcctcgtcttcgtcttcgtgtaagaacaagaacaagaagagtaagattaagaagtacaaaggagtgaggatgagaagttggggatcatgggtctctgagattagggcaccaaatcaaaagacaaggatttggttaggttcttactcaacagctgaagcagctgctagagcttacgatgttgcactcttatgtctcaaaggccctcaagccaatctcaacttccctacttcttcttcttctcatcatcttcttgataatctcttagatgaaaatacccttttgtcccccaaatccatccaaagagtagctgctcaagctgccaactcatttaaccattttgcccctacttcatcagccgtctcgtcaccgtccgatcatgatcatcaccatgatgatgggatgcaatctttgatgggatcttttgtggacaatcatgtgtctttgatggattcaacatcttcatggtatgatgatcataatgggatgttcttgtttgataatggagctccattcaattactctcctcaactaaactcgacgacgatgctcgatgaatacttctacgaagatgctgacattccgctttggagtttcaattaatccgacggtccataatacatactttaattagt

SEQ ID NO: 757 - protein, 230 aa, Arabidopsis thaliana
MVKQERKIQTSSTKKEMPLSSSPSSSSSSSSSSSSSSCKNKNKKSKIKKYKGVRMRSWGSWVSEIRAPNQKTRIWLGSYSTAEAAARAYDVALLCLKGPQANLNFPTSSSSHHLLDNLLDENTLLSPKSIQRVAAQAANSFNHFAPTSSAVSSPSDHDHHHDDGMQSLMGSFVDNHVSLMDSTSSWYDDHNGMFLFDNGAPFNYSPQLNSTTMLDEYFYEDADIPLWSFN

SEQ ID NO: 758 - DNA, 1019 bp, Arabidopsis thaliana
cctctcttcattttttaactccctctctctctctctctctatggagagacgaacgagacgagtgaagttcacagagaatcgtacggtcacaaacgtagcagctacaccatctaacgggtctccgagactggtccgtatcactgttactgatcctttcgctactgactcgtctagcgacgacgacgacaacaacaacgtcacggtggttccaagagtgaaacgatacgtgaaggagattagattctgccaaggtgaatcttcttcctccaccgcggcgaggaaaggtaagcacaaggaggaggaaagcgtagtggttgaagatgacgtgtcgacgtcggtgaagcctaaaaagtacagaggcgtgagacagagaccttggggaaaattcgcggcggagattagagatccgtcgagccgtactcggatttggcttgggacttttgtcacggcggaggaagctgctatagcgtacgatagagccgcgattcatctcaaaggacctaaagcgctcacgaatttcctaactccgccgacgccaacgccggttatcgatctccaaacggtttccgcctgcgattacggtagagattctcggcagagccttcattcaccgacctctgttctaagattcaacgtcaacgaggaaacagagcatgagattgaagcgatcgagctatctccggagagaaagtcgacggttataaaagaagaagaagaatcgtcggcgggtttggtgttcccggatccgtatctgttaccggatttatctctcgccggcgaatgtttttgggataccgaaattgcccctgaccttttgtttctcgatgaagaaaccaaaatccaatcaacgttgttaccaaacacagaggtttcgaaacaaggagaaaacgaaactgaagatttcgagtttggtttgattgatgatttcgagtcttctccatgggatgtggatcatttcttcgaccatcatcatcactctttcgattaaaaatctcttcttttttggggaaatttttgtg

SEQ ID NO: 759 - protein, 315 aa, Arabidopsis thaliana
MERRTRRVKFTENRTVTNVAATPSNGSPRLVRITVTDPFATDSSSDDDDNNNVTVVPRVKRYVKEIRFCQGESSSSTAARKGKHKEEESVVVEDDVSTSVKPKKYRGVRQRPWGKFAAEIRDPSSRTRIWLGTFVTAEEAAIAYDRAAIHLKGPKALTNFLTPPTPTPVIDLQTVSACDYGRDSRQSLHSPTSVLRFNVNEETEHEIEAIELSPERKSTVIKEEEESSAGLVFPDPYLLPDLSLAGECFWDTEIAPDLLFLDEETKIQSTLLPNTEVSKQGENETEDFEFGLIDDFESSPWDVDHFFDHHHHSFD

SEQ ID NO: 760 - DNA, 904 bp, Arabidopsis thaliana
gagcaaaaactttgtgtgcgtgtgtgtgtgtgttcatggctggtcttaggaattccggtaacagcgacaaagcgcaaaacgatggcaaaggtgtaccatctgcctacagaggagtccggaagagaaaatgggggaaatgggtgtctgaaatccgtgaaccggggaccaagaaccgtatctggctaggcagtttcgagactcctgaaatggctgcaaccgcatacgacgtggcagcatttcatttcagagggagagaagctcgtctcaacttccctgagctcgccagcagccttccacgtcctgcagactctagctcagacagcattcgcatggcagttcatgaggcaacactctgccgcaccaccgaaggaacagagtcagccatgcaagtggacagctcaagctcctccaatgtagctccaacaatggtcagactctcgcccagggaaattcaagcgatcaacgagtcaactttgggatctcctactacaatgatgcattcaacatacgaccctatggagtttgctaatgatgtggagatgaatgcttgggaaacataccagagtgactttctttgggacccttaaccccaaaacctaactcatggagagcttctacagctcaatcttacaataccagcataagttactggcttagaatacttaaatttattgaagtttagttttcagagtctaccacaagggttgttgattctgacgttatagcaaagaataaagctcatcagattttggagggaaagactctatgagcttgatgggtccctgaaaggacctcttcacaaatatttttaaatttttttgttactagtagaaacatagattatgaggtgtgacttattattattttttacaattgtttgttacctcattgatgtatttgattt

SEQ ID NO: 761 - protein, 183 aa, Arabidopsis thaliana
MAGLRNSGNSDKAQNDGKGVPSAYRGVRKRKWGKWVSEIREPGTKNRIWLGSFETPEMAATAYDVAAFHFRGREARLNFPELASSLPRPADSSSDSIRMAVHEATLCRTTEGTESAMQVDSSSSSNVAPTMVRLSPREIQAINESTLGSPTTMMHSTYDPMEFANDVEMNAWETYQSDFLWDP

SEQ ID NO: 762 - DNA, 1024 bp, Arabidopsis thaliana
tcttcttcttcctccataccttatctcaccagcttctccatatctctcaaagaaaaaacaaaccctataaattccacaaaaaaggaggatggataactccgacattctaatgaacatgatgatgcagcagatggagaagcttcctgaacacttctctaactcaaaccctaaccctaatccccataacattatgatgctttctgaatccaacacccacccgttcttcttcaaccccactcattctcatctcccatttgaccaaaccatgcctcaccaccaacccggtttaaatttccggtacgccccctccccgtcatcatctctcccggagaagagaggaggctgcagcgacaacgccaacatggcggcgatgagagagatgatctttcgaatagccgtgatgcagcctatacatattgatccggaatccgtaaagccaccaaagagaaagaacgtgaggatctctaaggatccacagagcgtggcagctcggcatcgaagggagaggataagcgagcggattcggattcttcagcggcttgttcccggtgggactaagatggatacggcgtcgatgctcgatgaggctatccattacgttaagtttctcaagaagcaagtgcagtcgctggaggaacatgcggtggttaacggcggaggaatgacggcggtggccggaggagcacttgcgggtactgttggtggaggatatggaggaaaagggtgtggcattatgcggtctgatcatcaccagatgcttggaaatgcacagattcttagatgatgatgatgttgatttttaaatatatatcatatgtttattaatatgacgggaaaaaatattatcgagggagttgaatttagtatcatgaaactatgagagcattttttttaaatgtttttatctttccgggtttcgataatgtttgggatggttaattaacaatttaaaagtcagacaacttggttgtaaagactaaagaataagcatagtttatcaatttatcattactaaatgaaatag

SEQ ID NO: 763 - protein, 231 aa, Arabidopsis thaliana
MDNSDILMNMMMQQMEKLPEHFSNSNPNPNPHNIMMLSESNTHPFFFNPTHSHLPFDQTMPHHQPGLNFRYAPSPSSSLPEKRGGCSDNANMAAMREMIFRIAVMQPIHIDPESVKPPKRKNVRISKDPQSVAARHRRERISERIRILQRLVPGGTKMDTASMLDEAIHYVKFLKKQVQSLEEHAVVNGGGMTAVAGGALAGTVGGGYGGKGCGIMRSDHHQMLGNAQILR

SEQ ID NO: 764 - DNA, 777 bp, Arabidopsis thaliana
atggacgtttttgttgatggtgaattggagtctctcttggggatgttcaactttgatcaatgttcatcatctaaagaggagagaccgcgagacgagttgcttggcctctctagcctttacaatggtcatcttcatcaacatcaacaccataacaatgtcttatcttctgatcatcatgctttcttgctccctgatatgttcccatttggtgcaatgccgggaggaaatcttccggccatgcttgattcttgggatcaaagtcatcacctccaagaaacgtcttctcttaagaggaaactacttgacgtggagaatctatgcaaaactaactctaactgtgacgtcacaagacaagagcttgcgaaatccaagaaaaaacagagggtaagctcggaaagcaatacagttgacgagagcaacactaattgggtagatggtcagagtttaagcaacagttcagatgatgagaaagcttcggtcacaagtgttaaaggcaaaactagagccaccaaagggacagccactgatcctcaaagcctttatgctcggaaacgaagagagaagattaacgaaaggctcaagacactacaaaaccttgtgccaaacgggacaaaagtcgatataagcacgatgcttgaagaagcggtccattacgtgaagttcttgcagcttcagattaagttgttgagctcggatgatctatggatgtacgcaccattggcttacaacggcctggacatggggttccatcacaaccttttgtctcggcttatgtga

SEQ ID NO: 765 - protein, 258 aa, Arabidopsis thaliana
MDVFVDGELESLLGMFNFDQCSSSKEERPRDELLGLSSLYNGHLHQHQHHNNVLSSDHHAFLLPDMFPFGAMPGGNLPAMLDSWDQSHHLQETSSLKRKLLDVENLCKTNSNCDVTRQELAKSKKKQRVSSESNTVDESNTNWVDGQSLSNSSDDEKASVTSVKGKTRATKGTATDPQSLYARKRREKINERLKTLQNLVPNGTKVDISTMLEEAVHYVKFLQLQIKLLSSDDLWMYAPLAYNGLDMGFHHNLLSRLM

SEQ ID NO: 766 - DNA, 1496 bp, Arabidopsis thaliana
ttttttttttagggttcataagaacaaattggattttgagctcacagtataaataacccgactttgattactgggtaattttaaaaccgccattgttgttctctttactacttttgggaattagggtttatgatttctgggtattagattagataaatttgtttcctttttttgttaatcaatttaaaaatctcttatttctgttaaagacttgtaattttggagtttttaatgcatggacggaagagaagcaatggcatttccaggctcgcattctcagtactatcttcaaagaggagcctttactaatctcgcaccttcccaagtcgcgagtgggcttcacgcgccgccgccacatacgggattgaggccaatgtctaaccctaacattcatcaccctcaggctaacaatccaggacctcctttctcggattttggacacaccattcacatgggagtggtctcctctgcttctgatgctgatgtgcaaccgccaccgccaccgccaccaccagaggaaccgatggttaagaggaaacgtggacggccaagaaagtatggagaaccgatggttagtaataagtctagggactcttctccaatgtctgatcctaatgaacctaaacgggccagaggtcgacctcctggaactggaaggaagcaacgcttggctaatcttggtgagtggatgaatacttcagctggacttgcttttgcacctcatgtgatcagcattggagcaggagaagacattgctgcgaaagttttgtcattttcacaacaaagacctcgggctctttgtataatgtcaggcactggaaccatttcttcagtcactctgtgcaaacccggttcaaccgatcgtcacttaacatacgagggaccttttgagattataagttttggtggatcttatttggtgaatgaagaaggtggatccagaagtcgaacaggcggattgagtgtctctctttctcgtcccgatggtagtattattgccggtggagttgacatgcttatcgcagccaaccttgttcaggtggtggcatgtagttttgtatacggagcaagggcaaagactcataataacaataacaagaccatcagacaagaaaaggaaccaaatgaagaggacaacaatagtgaaatggagaccacaccgggtagtgcagctgaaccagcagcatctgcgggtcagcagacgccacagaacttctcttctcagggaataagggggtggcccggttcaggctcaggctctggcagatcacttgacatttgcagaaacccactcactgattttgatttgactcgtggatgatatacactattagtctttgaagcagcagcatacaaaatgtgattgctgtacatatgttattgtagatttctctctgggaatgttgaaatcagacatttaaggattgatactagatctctcagctccttctaacattgttaatgtaacagaaccctcccactttcatgctatttgc

SEQ ID NO: 767 - protein, 361 aa, Arabidopsis thaliana
MDGREAMAFPGSHSQYYLQRGAFTNLAPSQVASGLHAPPPHTGLRPMSNPNIHHPQANNPGPPFSDFGHTIHMGVVSSASDADVQPPPPPPPPEEPMVKRKRGRPRKYGEPMVSNKSRDSSPMSDPNEPKRARGRPPGTGRKQRLANLGEWMNTSAGLAFAPHVISIGAGEDIAAKVLSFSQQRPRALCIMSGTGTISSVTLCKPGSTDRHLTYEGPFEIISFGGSYLVNEEGGSRSRTGGLSVSLSRPDGSIIAGGVDMLIAANLVQVVACSFVYGARAKTHNNNNKTIRQEKEPNEEDNNSEMETTPGSAAEPAASAGQQTPQNFSSQGIRGWPGSGSGSGRSLDICRNPLTDFDLTRG

SEQ ID NO: 768 - DNA, 1666 bp, Arabidopsis thaliana
gcaaaaagaaaaaatgaaaaaaaatccctaactctctctctctagaaattcttatttttgtgcgtatctctctaaaaaggaatggatcctaacgaaagccaccatcaccaccaacaacaacagctccatcacctccaccaacagcaacagcaacagcagcagcagcaacgactcacttctccttacttccaccaccaactacagcaccatcaccaccttccaaccaccgtagcaaccaccgcttctaccggaaacgccgttccatcttccaacaatgggcttttccctccgcagcctcagccacagcaccagcctaatgatgggtcatcttctctcgcggtgtaccctcattcagttccgtcctcggctgtgacggcgccgatggagccggtaaagaggaagaggggtcgaccaagaaagtatgtgacgccggaacaagccctagcggctaagaaattggcgtcttctgcgagtagttcgtctgctaaacagaggcgagagcttgctgctgttaccggtggtacggtatcgactaattccgggtcatccaagaaatctcagcttggttctgtcgggaaaactggacaatgttttactccgcatattgttaatatagctcctggcgaggatgtggtccagaaaattatgatgttcgcaaaccaaagcaagcatgaactatgcgttctttctgcatcaggcactatctctaatgcatccttgcgccaaccggctccatcaggaggcaacttaccatatgagggtcaatacgagattctctcactatctggatcctatatccgaactgaacaaggtggtaaatccggcggccttagcgtttctttatctgcttcagatggtcagatcatcggtggagcgattggtagccatctcacagctgctggcccggttcaggtgattcttggtacgtttcagcttgatagaaagaaggatgccgccgggagtggtgggaaaggggatgcttcaaacagtggaagtcggttaacttctcctgtaagctctggacagttgcttggcatgggtttccctcctggtatggaatctacgggaagaaatccaatgaggggaaacgacgagcaacatgatcatcatcatcatcaagccggtttgggtggacctcatcatttcatgatgcaagcgccgcaggggatacacatgacacattccaggccatctgaatggcgcggaggaggcaacagcggtcatgatggcagaggcggtggcgggtatgatttgtcaggaaggataggacatgagtcgtcggagaatggagattacgagcagcaaataccggattagcagagcttccaggagaagtgtgtagagtttagatcccaagtagagaaacagaaggcgagcaaagaatctgaactgagagaggacttattagacagagactcgtctgaagggtctttaatcatagaaagaagttgctgagtgattgcttttgttcttcttcttggtacggtgtattatattaactccacaaccttttttttatactttcagtaacgattctccttcactttcaatttcattccttttttttatactctttttcttttcttataatattttttttggtttttctttcgtttgttactaaaaaaggaaatgctctttttgtgaaatatatacacttcgtttg

SEQ ID NO: 769 - protein, 411 aa, Arabidopsis thaliana
MDPNESHHHHQQQQLHHLHQQQQQQQQQQRLTSPYFHHQLQHHHHLPTTVATTASTGNAVPSSNNGLFPPQPQPQHQPNDGSSSLAVYPHSVPSSAVTAPMEPVKRKRGRPRKYVTPEQALAAKKLASSASSSSAKQRRELAAVTGGTVSTNSGSSKKSQLGSVGKTGQCFTPHIVNIAPGEDVVQKIMMFANQSKHELCVLSASGTISNASLRQPAPSGGNLPYEGQYEILSLSGSYIRTEQGGKSGGLSVSLSASDGQIIGGAIGSHLTAAGPVQVILGTFQLDRKKDAAGSGGKGDASNSGSRLTSPVSSGQLLGMGFPPGMESTGRNPMRGNDEQHDHHHHQAGLGGPHHFMMQAPQGIHMTHSRPSEWRGGGNSGHDGRGGGGYDLSGRIGHESSENGDYEQQIPD

SEQ ID NO: 770 - DNA, 1361 bp, Arabidopsis thaliana
ttttttttccctttcctcgttcaaaaaaagtacttgcagagtcactcactctcagtctcagcacatgaattaatttgaagcttccctagaattctttcacatcaattaatacgacaccgtctcgggtgaagaatctctcctctcttgccctaaagcgagttagggtttaacacacaaagcataccctttagatttgtgtctcttagctctgtttttgtcggcttgtgtaaccgatcaactcaagctattggctcctcacctcctgaaatttgacttctccaatggatctcaaagtttctcttatatgaattctatcttcaccctcacaatatctttatatatatgagccacaagaacaagaagagtcagtagatgcggctgccatggacggtggttacgatcaatccggaggagcttctagatactttcacaacctcttcaggcctgagcttcatcaccagcttcaacctcagcctcaacttcaccctttgcctcagcctcagcctcaacctcagcctcagcagcagaattcagatgatgaatctgactccaacaaggatccgggttccgacccagttacctctggttcaaccgggaaacgtccacgtggacgtcctccgggatccaagaacaagccgaagccaccggtgatagtgactagagatagccccaacgtgcttagatctcatgttcttgaagtctcatctggagccgacatagtcgagagcgttaccacttacgctcgcaggagaggaagaggagtctccattctcagtggtaacggcacggtggctaacgtcagtctccggcagccggcaacgacagcggctcatggggcaaatggtggaaccggaggtgttgtggctctacatggaaggtttgagatactttccctcacaggtacggtgttgccgccccctgcgccgccaggatccggtggtctttctatctttctttccggcgttcaaggtcaggtgattggaggaaacgtggtggctccgcttgtggcttcgggtccagtgatactaatggctgcatcgttctctaatgcaactttcgaaaggcttccccttgaagatgaaggaggagaaggtggagagggaggagaagttggagagggaggaggaggagaaggtggtccaccgccggccacgtcatcatcaccaccatctggagccggtcaaggacagttaagaggtaacatgagtggttatgatcagtttgccggtgatcctcatttgcttggttggggagccgcagccgcagccgcaccaccaagaccagccttttagaattgaaaattatgtccgtaacatagctgtaaccaaatttcatttctcaaaattaaaagaaaaaaaaaa

SEQ ID NO: 771 - protein, 302 aa, Arabidopsis thaliana
MDGGYDQSGGASRYFHNLFRPELHHQLQPQPQLHPLPQPQPQPQPQQQNSDDESDSNKDPGSDPVTSGSTGKRPRGRPPGSKNKPKPPVIVTRDSPNVLRSHVLEVSSGADIVESVTTYARRRGRGVSILSGNGTVANVSLRQPATTAAHGANGGTGGVVALHGRFEILSLTGTVLPPPAPPGSGGLSIFLSGVQGQVIGGNVVAPLVASGPVILMAASFSNATFERLPLEDEGGEGGEGGEVGEGGGGEGGPPPATSSSPPSGAGQGQLRGNMSGYDQFAGDPHLLGWGAAAAAAPPRPAF

SEQ ID NO: 772 - DNA, 1496 bp, Arabidopsis thaliana
tcttttgattttaaccttttttcagtagcaagccaaaaaaaaaaaacagacaaagaagttccttttatgataaaggtatgatgatagcaaacaaatgatacccccatgtcttgtgtgtctgcttcatgcaacatgttggtttggatttggttaatctaaaagtttaagataaggttttcggattctcttcctgtcttgtaatagtttcttgtcggagagccatcaacaccaacttcaacaaaaaaaacaagaaaaagaaaaagattctctttctcgttttatttccattagagaagaaaaaaagaatggcgaatccttggtgggtagggaatgttgcgatcggtggagttgagagtccagtgacgtcatcagctccttctttgcaccacagaaacagtaacaacaacaacccaccgactatgactcgttcggatccaagattggaccatgacttcaccaccaacaacagtggaagccctaatacccagactcagagccaagaagaacagaacagcagagacgagcaaccagctgttgaacccggatccggatccgggtctacgggtcgtcgtcctagaggtagacctcctggttccaagaacaaaccaaagagtccagttgttgttaccaaagaaagccctaactctctccagagccatgttcttgagattgctacgggagctgacgtggcggaaagcttaaacgcctttgctcgtagacgcggccggggcgtttcggtgctgagcggtagtggtttggttactaatgttactctgcgtcagcctgctgcatccggtggagttgttagtttacgtggtcagtttgagatcttgtctatgtgtggggcttttcttcctacgtctggctctcctgctgcagccgctggtttaaccatttacttagctggagctcaaggtcaagttgtgggaggtggagttgctggcccgcttattgcctctggacccgttattgtgatagctgctacgttttgcaatgccacttatgagaggttaccgattgaggaagaacaacagcaagagcagccgcttcaactagaagatgggaagaagcagaaagaagagaatgatgataacgagagtgggaataacggaaacgaaggatcgatgcagccgccgatgtataatatgcctcctaattttatcccaaatggtcatcaaatggctcaacacgacgtgtattggggtggtcctccgcctcgtgctcctccttcgtattgattagttagataggcggtggttggtgcgttctttttactggaatgattatattttccattaggatggttaggcttttgtttattaaagctatcaagtttcttttttttttacggataattcggatgacaattagctagtgtttgtttgtttgttttgtggcggcttttctgacttgactattttgatcgcggatagctttgtatgaaagtgaattgattgtagaatcgtcttttgaattttgatgttggaaaaaaccaa

SEQ ID NO: 773 - protein, 310 aa, Arabidopsis thaliana
MANPWWVGNVAIGGVESPVTSSAPSLHHRNSNNNNPPTMTRSDPRLDHDFTTNNSGSPNTQTQSQEEQNSRDEQPAVEPGSGSGSTGRRPRGRPPGSKNKPKSPVVVTKESPNSLQSHVLEIATGADVAESLNAFARRRGRGVSVLSGSGLVTNVTLRQPAASGGVVSLRGQFEILSMCGAFLPTSGSPAAAAGLTIYLAGAQGQVVGGGVAGPLIASGPVIVIAATFCNATYERLPIEEEQQQEQPLQLEDGKKQKEENDDNESGNNGNEGSMQPPMYNMPPNFIPNGHQMAQHDVYWGGPPPRAPPSY

SEQ ID NO: 774 - DNA, 1116 bp, Arabidopsis thaliana
atggagatagggtcgtcatccacggtggctggcggaggacagctttcggtgcctccgggattccggtttcatccaacggaggaggagcttctttactattacctcaagaagaaggtttcttatgaaccaattgatttagatgtaattagagaagttgatctcaacaagctggaaccttgggaacttaaagagaaatgcagaatcgggtcgggtcctcaaaacgagtggtatttctttagccacaaggacaagaaatatccgactgggacccgaacgaaccgggcgacagcagccgggttctggaaagctactggtagagacaaatccatacatctcaacagctccaagaagattggacttcgtaagactcttgtcttctacactggtcgtgctcctcatggccaaaaaaccgaatggatcatgcacgaatatcgcttggacgatagcgaaaacgaaattcaggaagatgggtgggttgtatgcagagtgttcaagaagaagaatcatttcagaggatttcaccaagaacaagagcaagatcatcatcatcatcaccaatacataagcaccaacaatgatcatgatcaccatcatcacattgactccaattcaaacaatcattctcctttgatcctacatcctctggatcatcatcaccaccatcatcacattggacgacaaatccacatgccattacatgagtttgcaaacactctgagccatggctcaatgcatctacctcagctctttagccctgactcagctgcagcggcggctgccgcagcagcatcagcccaaccatttgtgtcgccaatcaacactacggacattgaatgttcacagaatctactgaggttgacttctaacaacaactatggtggagactggtcgtttctggacaagcttctcactacaggcaacatgaatcagcaacagcagcagcaagtgcagaaccatcaagcaaaatgttttggtgacttgagtaacaacgataataacgatcaggctgatcatttgggtaacaacaatggtggttcttcttcatctccagttaatcaaaggtttccgtttcactacttgggaaacgacgctaatcttctcaagttcccaaagtag

SEQ ID NO: 775 - protein, 371 aa, Arabidopsis thaliana
MEIGSSSTVAGGGQLSVPPGFRFHPTEEELLYYYLKKKVSYEPIDLDVIREVDLNKLEPWELKEKCRIGSGPQNEWYFFSHKDKKYPTGTRTNRATAAGFWKATGRDKSIHLNSSKKIGLRKTLVFYTGRAPHGQKTEWIMHEYRLDDSENEIQEDGWVVCRVFKKKNHFRGFHQEQEQDHHHHHQYISTNNDHDHHHHIDSNSNNHSPLILHPLDHHHHHHHIGRQIHMPLHEFANTLSHGSMHLPQLFSPDSAAAAAAAAASAQPFVSPINTTDIECSQNLLRLTSNNNYGGDWSFLDKLLTTGNMNQQQQQQVQNHQAKCFGDLSNNDNNDQADHLGNNNGGSSSSPVNQRFPFHYLGNDANLLKFPK

SEQ ID NO: 776 - DNA, 1005 bp, Arabidopsis thaliana
atgatgcttgcggtggaagatgtgttaagcgaactcgccggagaagaaaggaacgagagaggattgccacctggcttccggtttcacccgacggacgaagagctcattaccttctacttagcttccaaaatcttccatggtggtctctccggcattcacatttccgaagttgatctcaaccgctgtgaaccttgggagctaccagaaatggcgaagatgggagagagagagtggtacttttatagtctaagggacaggaaatatccgacaggtttgaggactaacagagcaactactgctggatactggaaagctaccggcaaagataaggaagtcttctccggcggaggaggacagcttgttgggatgaagaagacgttggtgttctacaaaggtagggctccacgtggcctcaagactaagtgggtcatgcatgagtatcgcctcgaaaacgaccattcacaccgccacacgtgtaaggaggaatgggtgatttgcagagtgttcaataaaacaggagacagaaaaaatgttggattaatccataaccaaatcagctaccttcataaccattcactctcaacaacacatcatcatcatcatgaagccttacctttgcttatagaaccttccaacaaaaccctaaccaacttcccatcactactctacgatgatccacaccaaaactacaataataacaacttccttcatggatcatcaggccacaacatcgacgagctcaaagccttaatcaaccctgtcgtctctcagctcaacggtatcatctttccttcagggaacaacaacaacgacgaagacgacttcgactttaacctcggcgtgaaaacagagcagtcttcgaacggtaacgaaattgacgtacgagattacttggagaaccctctgtttcaggaagcgagttatggtctgttgggtttttcgtcttctcctggacctcttcacatgctactagattctccatgtcctttaggattccagctgtag

SEQ ID NO: 777 - protein, 334 aa, Arabidopsis thaliana
MMLAVEDVLSELAGEERNERGLPPGFRFHPTDEELITFYLASKIFHGGLSGIHISEVDLNRCEPWELPEMAKMGEREWYFYSLRDRKYPTGLRTNRATTAGYWKATGKDKEVFSGGGGQLVGMKKTLVFYKGRAPRGLKTKWVMHEYRLENDHSHRHTCKEEWVICRVFNKTGDRKNVGLIHNQISYLHNHSLSTTHHHHHEALPLLIEPSNKTLTNFPSLLYDDPHQNYNNNNFLHGSSGHNIDELKALINPVVSQLNGIIFPSGNNNNDEDDFDFNLGVKTEQSSNGNEIDVRDYLENPLFQEASYGLLGFSSSPGPLHMLLDSPCPLGFQL

SEQ ID NO: 778 - DNA, 771 bp, Arabidopsis thaliana
atgagttcgtcaaaacattcctctgtttttaactattctgctctgtttctatcactgtttcttcaacaaatggatcagaactctcttcatcatctcgattctccaaaaatcgaaaacgagtatgaaccagattcgttatacgacatgttagataagttgcctccgcttgattctctcctagatatggaagatttgaaaccaaatgcagggttgcactttcagttccattacaatagctttgaagatttcttcgaaaacattgaagtggataacacaattccatctgatattcacttgttgacacaagagccctacttctcaagtgactcctcttcctcttcaccattggctatccaaaacgacggtctcatttccaacgtgaaagttgaaaaggtaacagttaagaagaagaggaaccttaagaaaaagaggcaagacaaattggagatgtctgagatcaaacaatttttcgataggccgatcatgaaagcggctaaagaactgaacgtgggactcactgtgttgaagaagcgatgcagggaattaggaatttaccggtggcctcaccggaagctcaagagtctaaactctcttataaagaatctcaagaatgttggaatggaagaggaagtgaagaacttggaggaacataggtttcttattgaacaagaacctgatgcagaactcagtgatggaaccaagaagctaaggcaagcttgtttcaaagccaattataagagaagaaaatcacttggtgatgattattattga

SEQ ID NO: 779 - protein, 256 aa, Arabidopsis thaliana
MSSSKHSSVFNYSALFLSLFLQQMDQNSLHHLDSPKIENEYEPDSLYDMLDKLPPLDSLLDMEDLKPNAGLHFQFHYNSFEDFFENIEVDNTIPSDIHLLTQEPYFSSDSSSSSPLAIQNDGLISNVKVEKVTVKKKRNLKKKRQDKLEMSEIKQFFDRPIMKAAKELNVGLTVLKKRCRELGIYRWPHRKLKSLNSLIKNLKNVGMEEEVKNLEEHRFLIEQEPDAELSDGTKKLRQACFKANYKRRKSLGDDYY

SEQ ID NO: 780 - DNA, 834 bp, Arabidopsis thaliana
atggctgatcaaagacctctaatgacctggttagaggccaacaactatgaatcattccttcaagaagacatattctcgtttctcgatcaatcacttttcgtcgatcctcacagctctttcattgacccttttaaggattttcaaacccaaaattggttttctctccaagacagcattgttaatcatatatctactacctttgcggctgatcatacgtttctggcttcacttgatcttgaagctatctctagtactttctctctagatatatcgagtggatggtggaacgagaataatggtaactacaataaccaggtcgaaccaaaccttgatgaaatttcaagaactaataccatgggagatccaaatatggagcaaatattgcatgaagatgttaacacaatgaaagagaaaacaagccagaagaggataattatgaagaggcgatatagagaagatggagtcatcaataatatgtcaagggaaatgatgaagcagtacttctacatgccgataactaaagcagccaaggagcttaacattggtgtaaccctcttgaagaaaagatgtcgtgagttaggtattcctcgttggcctcaccgtaagctcacgagcctaaacgctctaattgctaatctcaaggacttgttagggaacacgaaggggagaacgcccaagagtaagctgaggaacgctttggagcttttggagatggagaagaagatgattgaggaagttcccgatttggaatttggggataagactaagaggttaagacaggcttgcttcaaggctaaatacaaacggagaaggctcttctcatcttcttcatga

SEQ ID NO: 781 - protein, 277 aa, Arabidopsis thaliana
MADQRPLMTWLEANNYESFLQEDIFSFLDQSLFVDPHSSFIDPFKDFQTQNWFSLQDSIVNHISTTFAADHTFLASLDLEAISSTFSLDISSGWWNENNGNYNNQVEPNLDEISRTNTMGDPNMEQILHEDVNTMKEKTSQKRIIMKRRYREDGVINNMSREMMKQYFYMPITKAAKELNIGVTLLKKRCRELGIPRWPHRKLTSLNALIANLKDLLGNTKGRTPKSKLRNALELLEMEKKMIEEVPDLEFGDKTKRLRQACFKAKYKRRRLFSSSS

SEQ ID NO: 782 - DNA, 764 bp, Arabidopsis thaliana
ataaccaaacaaagccaagcaaagcagagagaagagaccaaagctttttcaaagactaaaaaaatggctgcaaatgaattagcttcttcttcagttcaagccttccaagagcaatcccttggcggttttgtctctagaaagctgcttctgcacaacccatttgaccacaacactcaaagagcctttgcagttgcaccatctcctctcataacccatgagaacaacctcagtggaaatgttctgatgcttctctcagtcctcatctgtggcatcatctgttgcctcgggttacattacatcattcgttgtgcattcagacgtacttcaagtttcatgatctctgagcctatagccggtctttcaacaccatgcggttcatcaaacaaaggaatcaataagaaagctcttagaatgttcccagttgtgagttactcacctgagatgaacttgccggggcttggcgaagagtgtgtcatttgtttgtcagattttgtttccggtgaacagattaggatgctacctaagtgccaccatgggttccatgttcgttgcatagacaagtggcttcaacaacatttgacttgtccaaaatgcagacactgtctggttgagacatgccaaaagatcttaggtgacttcagtcaagctgatcaagtggcagcaacaccaacagcgagcgtaattgtcaggattgctcctctggaacctgaaggaagagtaaacattttaagagaaagcagctagatgccaagagaggcagaaac

SEQ ID NO: 783 - protein, 226 aa, Arabidopsis thaliana
MAANELASSSVQAFQEQSLGGFVSRKLLLHNPFDHNTQRAFAVAPSPLITHENNLSGNVLMLLSVLICGIICCLGLHYIIRCAFRRTSSFMISEPIAGLSTPCGSSNKGINKKALRMFPVVSYSPEMNLPGLGEECVICLSDFVSGEQIRMLPKCHHGFHVRCIDKWLQQHLTCPKCRHCLVETCQKILGDFSQADQVAATPTASVIVRIAPLEPEGRVNILRESS

SEQ ID NO: 784 - DNA, 1312 bp, Arabidopsis thaliana
ttctttctttctttctttctcttccaatcaagaacaaaccctagctcctctctttttctctctctacctctctttctctatcttctcttatcactacttctctcgccgatcaatcatcatgaacgatcctgataatcccgatctgagcaacgacgactctgcttggagagaactcacactcacagctcaagattctgacttcttcgaccgagacacttccaatatcctctctgacttcggttggaacctccaccactcctccgatcatcctcacagtctcagattcgactccgatttaacacaaaccaccggagtcaaacctaccaccgtcacttcttcttgttcctcatccgccgccgtttccgttgccgttacctctactaataataatccctcagctacctcaagttcaagtgaagatccggccgagaactcaaccgcctccgccgagaaaacaccaccaccggagacaccagtgaaggagaagaagaaggctcaaaagcgaattcggcaaccaagattcgcattcatgaccaagagtgatgtggataatcttgaagatggatatcgatggcgtaaatatggacaaaaagccgtcaagaatagcccattcccaaggagctactatagatgcacaaacagcagatgcacggtgaagaagagagtagaacgttcatcagatgatccatcgatagtgatcacaacatacgaaggacaacattgccatcaaaccattggattccctcgtggtggaatcctcactgcacacgacccacatagcttcacttctcatcatcatctccctcctccattaccaaatccttattattaccaagaactccttcatcaacttcacagagacaataatgctccttcaccgcggttaccccgacctactactgaagatacacctgccgtgtctactccatcagaggaaggcttacttggtgatattgtacctcaaactatgcgcaacccttgaggtaagcttggtacgtagcaatagctaaggaggtgctaactcattatatatagaagatattgcagaccagaatatgcgcagggagggtataacaatatggcgttgtaacaatggatctatatattacctcattgttgatcaatagcacaccaccggtacgtttgcaatttcttcatgtatatttcttgttatatatgtagttatatatccaggtataattttgatgtaacacaacattaatcttaatcgtggatccatcccacatttgatgcatgtatgtgcacttaagaaaaagaacatggaggaaataacgttattttttattattct

SEQ ID NO: 785 - protein, 287 aa, Arabidopsis thaliana
MNDPDNPDLSNDDSAWRELTLTAQDSDFFDRDTSNILSDFGWNLHHSSDHPHSLRFDSDLTQTTGVKPTTVTSSCSSSAAVSVAVTSTNNNPSATSSSSEDPAENSTASAEKTPPPETPVKEKKKAQKRIRQPRFAFMTKSDVDNLEDGYRWRKYGQKAVKNSPFPRSYYRCTNSRCTVKKRVERSSDDPSIVITTYEGQHCHQTIGFPRGGILTAHDPHSFTSHHHLPPPLPNPYYYQELLHQLHRDNNAPSPRLPRPTTEDTPAVSTPSEEGLLGDIVPQTMRNP

SEQ ID NO: 786 - DNA, 941 bp, Arabidopsis thaliana
gcacacccatattcattgttcaaacataaccaaatccatcatttctagttatctttctatcattttacattttgactatttgataaactatagtaattagctatggagttcaatggtaatttgaatgccggttcttgctctagatcaaaaaagagtcataggcaaaagcagcaacaaccgcagccacagccacaacaacatattgaagaaataaagtatgtaggagtgaggaggaggccatggggaagatatgcagctgagataagaaacccgacgacgaaagagaggtattggctaggtacttttgacacggccgaggaggctgcattggcttatgatagagccgcacggtccataagaggcttgactgctcgaaccaactttgtctactccgatatgcctcgtggctcctcagtaacttcctttgtgtctcctgatgaatcccaacgtttcatttccgagttattcaaccctccaagccaactagaagctactaacagcaacaataacaacaataacaatctctactcatcgaccaacaaccaaaaccagaactctattgagttctcatacaatgggtggcctcaggaggctgaatgtggttatcaatctataaccagtaatgctgagcattgtgatcatgagcttccacctcttcctcccagtacttgttttggagctgaactgaggattccggagacggatagctattggaatgttgcgcatgcaagcatagacacgtttgccttcgagcttgatggctttgtggatcaaaacagtcttggtcagagtggaacagaagggtttaattctttaccctccacattcttctaccaataacagtcatgagttgtccaagtttgtgtctttgttctttggtatttcttttgttatcactgtccttttcgcctttataatggagtggaatgagagatatcaag

SEQ ID NO: 787 - protein, 245 aa, Arabidopsis thaliana
MEFNGNLNAGSCSRSKKSHRQKQQQPQPQPQQHIEEIKYVGVRRRPWGRYAAEIRNPTTKERYWLGTFDTAEEAALAYDRAARSIRGLTARTNFVYSDMPRGSSVTSFVSPDESQRFISELFNPPSQLEATNSNNNNNNNLYSSTNNQNQNSIEFSYNGWPQEAECGYQSITSNAEHCDHELPPLPPSTCFGAELRIPETDSYWNVAHASIDTFAFELDGFVDQNSLGQSGTEGFNSLPSTFFYQ

SEQ ID NO: 788 - DNA, 687 bp, Arabidopsis thaliana
tcctcccttaattagtatcaaaaatggtgaaaacacttcaaaagacaccaaagagaatgtcatctccatcatcatcatcttcatcatcctcatcaacatcatcatcatccataaggatgaagaagtacaagggagtgagaatgagaagttggggttcatgggtttcagagatcagagctcctaatcaaaagacaaggatctggcttggttcttactcaactgctgaagccgcggctagagcctacgacgcagcactcctatgtcttaaaggatcctcagctaataatctcaacttcccagagatctcaacttctctctaccatattatcaacaatggtgataacaacaatgacatgtcccctaagtctatacaaagagtagcagctgcagctgctgctgccaacacagatccttcctcatcatcagtctctacttcatctccattgctttcctctccatctgaagatctctatgatgttgtctccatgtcacagtatgaccaacaagtctccttgtctgaatcatcatcatggtacaactgctttgatggtgatgatcagttcatgttcattaatggagtctccgcgccgtatttgacaacatcactttctgatgatttctttgaggaaggagatatcagattatggaacttctgctgattctactttcattataccttattctttg

SEQ ID NO: 789 - protein, 211 aa, Arabidopsis thaliana
MVKTLQKTPKRMSSPSSSSSSSSSTSSSSIRMKKYKGVRMRSWGSWVSEIRAPNQKTRIWLGSYSTAEAAARAYDAALLCLKGSSANNLNFPEISTSLYHIINNGDNNNDMSPKSIQRVAAAAAAANTDPSSSSVSTSSPLLSSPSEDLYDVVSMSQYDQQVSLSESSSWYNCFDGDDQFMFINGVSAPYLTTSLSDDFFEEGDIRLWNFC

SEQ ID NO: 790 - DNA, 1013 bp, Arabidopsis thaliana
ttttcactatactgtcagctccaaaacatacctgaataagtgaatatacattaaaacctaatctatcatcatatccatctctttccctctctgcatttagagatatggatgcatccccaaagtacacaggtgtacggaagaggaagtggggaaaatgggtggctgagattcgtctccccaacagccgtgacaggatctggttaggctctttcgactctgctgagaaggcggcgcgtgctttcgacgcggctctttactgtcttcgtggccccggagcacgcttcaacttccccgacaatcctccggagattcccggtggtcgttctctgacgccgcagcagattcaggtcgtagctagccgtttcgcctgcgaggaggagctactaccaccggaacaacatcatccgtcaccgccacgtggcgaccataataccgaggaagaagtgataatttcggcacgtggggaaattaatagtggtagtggtgggcctacgttagggcaagttggggaagataataacaacgagggtaatagtaatgacacgtcgtcgtattggcctttaatatgggaggaggagaattttgtaggtcctcctaactcagatcatgagttcggttttttcacagatgattcaaccaatttgtacttcccgacacaacaacaacaacaacatcagctctcgtctgatttttactatgatggagcttgtgaagatgatttctctcattacaatattaacctttggaatttctgagatccatttttttggtgatcttggaccaaatattcctatattgattaattcaatttgtggatttcgaattcgagatttcaaatgatcttgaaccagaattttcaccacccactagtagtgtgaatcatttgtttgaactttgaagcgaatcctatatgccacaatgtaagcaagcctgagtaatagcttcactacttaattatcttattcttcttcttctttttggttattaaaaccaatctgtttcatatgattttt

SEQ ID NO: 791 - protein, 216 aa, Arabidopsis thaliana
MDASPKYTGVRKRKWGKWVAEIRLPNSRDRIWLGSFDSAEKAARAFDAALYCLRGPGARFNFPDNPPEIPGGRSLTPQQIQVVASRFACEEELLPPEQHHPSPPRGDHNTEEEVIISARGEINSGSGGPTLGQVGEDNNNEGNSNDTSSYWPLIWEEENFVGPPNSDHEFGFFTDDSTNLYFPTQQQQQHQLSSDFYYDGACEDDFSHYNINLWNF

SEQ ID NO: 792 - DNA, 1067 bp, Arabidopsis thaliana
gccaaaattttaccaacatttttctcttctcatatcaaagtttctctctcatttcttcatcacacttcactgccctgttttttttcctcattttgaatagttctcaaacttatatatttttccccctgaagcctagctatttctttttatttgcattaatctcgggatccgaatcgaaaaaagcaatcagaataatagacttgtacgatacttgtgcctaagctaacacaatggcagaggaatactacagcctccgctcggagagagtaactcagcttcttgtccctaactcggagtctgactcagtgagtgacaaaagcaaagctgagcaaagcgagaagaagactaaacgtgggagagactccggtaaacaccctgtttatcgcggagtaaggatgaggaactggggaaaatgggtgtcggagattcgtgagccgaggaagaaatcacgtatttggctgggaactttcccgacgccggagatggcggcgcgtgcacacgacgtggcggctctgagcattaaaggaacggccgctatactaaacttccctgaactcgctgactcattccctcgacccgtttcattaagccctcgagacattcagacagcagctcttaaagcagctcacatggaaccgacgacgtcgttttcatcttccacgtcttcgtcgtcgtctttgtcttctacgtcttcgctcgagtctcttgtgttggtgatggacctctcgaggactgagtcggaggagctcggtgagattgtggagcttccaagtctcggggcgagttacgacgtcgactcggctaaccttgggaacgagtttgtcttctatgactcagttgactactgtttatatccgccgccgtggggacagtcgtccgaagataactatggtcacggaattagccctaattttggccatggcttgtcatgggatctctaacagtttattttgtatcattaccataatgttttgtttaaaacagtttattttgtatcattgccataatgttttgtttaatcacgtttttaaaaccctttgctgtttttgttttttttttgagttttt

SEQ ID NO: 793 - protein, 236 aa, Arabidopsis thaliana
MAEEYYSLRSERVTQLLVPNSESDSVSDKSKAEQSEKKTKRGRDSGKHPVYRGVRMRNWGKWVSEIREPRKKSRIWLGTFPTPEMAARAHDVAALSIKGTAAILNFPELADSFPRPVSLSPRDIQTAALKAAHMEPTTSFSSSTSSSSSLSSTSSLESLVLVMDLSRTESEELGEIVELPSLGASYDVDSANLGNEFVFYDSVDYCLYPPPWGQSSEDNYGHGISPNFGHGLSWDL

SEQ ID NO: 794 - DNA, 755 bp, Arabidopsis thaliana
cgtcgacacaatcgctcttccgtaacatattccacaaaacgatcttcttgtttcttgaatttttagccatctcttttttttttttctcattttctcggatactatggcttcgagtccacgctggacggaggacgacaacaggcgttttaagtcagctctgtcgcaattccctccggataacaagcgtttggtgaatgtcgcccagcatctgccgaaacctttggaggaggtgaagtactactacgaaaagttggtcaacgatgtttatctgccgaaacctttagagaatgtcacccagcatctgcagaaacctatggaaatggaggagatgaagtacatgtacgaaaagatggccaacgatgttaatcagatgcccgagtacgtaccactggcggaatcgagtcagtccaaacgcaggaagaaggatacgccaaatccttggacagaagaggaacacagattgtttctgcaaggattgaaaaagtatggggaaggagcttcgacgttgacatcaacgaattttgtgaagacaaagactccacggcaagtgtcaagccatgcacagtattacaaaaggcaaaaatcggacaataagaaggagaaacgccggagtatttttgacataactttggagtctaccgagggcaatccagattctggaaatcagaaccctccggatgatgatgatccgtcccaaggtcaaggcacttgtcttggagtttagatgttggaagatagaagaatggtgtgaaagc

SEQ ID NO: 795 - protein, 206 aa, Arabidopsis thaliana
MASSPRWTEDDNRRFKSALSQFPPDNKRLVNVAQHLPKPLEEVKYYYEKLVNDVYLPKPLENVTQHLQKPMEMEEMKYMYEKMANDVNQMPEYVPLAESSQSKRRKKDTPNPWTEEEHRLFLQGLKKYGEGASTLTSTNFVKTKTPRQVSSHAQYYKRQKSDNKKEKRRSIFDITLESTEGNPDSGNQNPPDDDDPSQGQGTCLGV

SEQ ID NO: 796 - DNA, 1406 bp, Arabidopsis thaliana
atacaaaactccctcttctctatcttcttcatcttaaagaaaaaataagagatattcgtaaagagagaacacaaaatttcagtttacgaaaagctagcaaagtcgagtatcgaggaataacagaataagacgtatctatccttgccttaatgttcttaccaaaagatctagtcctttctttgtatgatcgatccatcacaagcccacaacaacaacaactacatctctttctctatctctagcttctatttttaatacattcaagaatcaagaatggtacggacgccgtgttgtagagcagaagggttgaagaaaggagcatggactcaagaagaagaccaaaagcttatcgcctatgttcaacgacatggtgaaggcggttggcgaacccttccggacaaagctggactcaaaagatgtggcaaaagctgcagattgagatgggcgaattacttaagacctgacattaaacgtggagagtttagccaagacgaggaagattccatcatcaacctccacgccattcatggcaacaaatggtcggccatagctcgtaaaataccaagaagaacagacaatgagatcaagaaccattggaacactcacatcaagaaatgtctggtcaagaaaggtattgatccgttgacccacaaatcccttctcgatggagccggtaaatcatctgaccattccgcgcatcccgagaaaagcagcgttcatgacgacaaagatgatcagaattcaaataacaaaaagttgtcaggatcatcatcagctcggtttttgaacagagtagcaaacagattcggtcatagaatcaaccacaatgttctgtctgatattattggaagtaatggcctacttactagtcacactactccaactacaagtgtttcagaaggtgagaggtcaacgagttcttcctccacacatacctcttcgaatctccccatcaaccgtagcataaccgttgatgcaacatctctatcctcatccacgttctctgactcccccgacccgtgtttatacgaggaaatagtcggtgacattgaagatatgacgagattttcatcaagatgtttgagtcatgttttatctcatgaagatttattgatgtccgttgagtcttgtttggagaatacttcattcatgagggaaattacaatgatctttcaagaggataaaatcgagacgacgtcgtttaatgatagctacgtgacgccgatcaatgaagttgatgactcctgtgaagggattgacaattattttggatgagttatattgatgatgatgaaaatttgcatttggcatgtaaatcaattagagtttgatttgctatggtgtttttagtttgtgtgtgtagtgtgtttcgaccgtcaaaaaaaaaaaaaaaaaaaaaaaaaaaa

SEQ ID NO: 797 - protein, 333 aa, Arabidopsis thaliana
MVRTPCCRAEGLKKGAWTQEEDQKLIAYVQRHGEGGWRTLPDKAGLKRCGKSCRLRWANYLRPDIKRGEFSQDEEDSIINLHAIHGNKWSAIARKIPRRTDNEIKNHWNTHIKKCLVKKGIDPLTHKSLLDGAGKSSDHSAHPEKSSVHDDKDDQNSNNKKLSGSSSARFLNRVANRFGHRINHNVLSDIIGSNGLLTSHTTPTTSVSEGERSTSSSSTHTSSNLPINRSITVDATSLSSSTFSDSPDPCLYEEIVGDIEDMTRFSSRCLSHVLSHEDLLMSVESCLENTSFMREITMIFQEDKIETTSFNDSYVTPINEVDDSCEGIDNYFG

SEQ ID NO: 798 - DNA, 966 bp, Arabidopsis thaliana
atggggagatcaccgtgttgcgatgagagcggattaaagaaagggccatggacgccagaagaagatcagaaactgataaatcacataagaaaacacggccatggaagctggagagctctacccaagcaagccggtttaaaccggtgtgggaagagttgcagattgagatggactaattacttgagaccagatatcaaaagaggaaacttcacagctgaggaagaacaaactatcattaaccttcattctcttcttgggaacaagtggtcgtctatagctggtcatctcccaggaagaacggataacgaaataaagaactattggaacacgcatattagaaagaaacttattcagatgggaatcgatccggtgacccataggccaagaaccgaccatctaaacgttctagccgctctcccgcaactactagctgccgcaaatttcaacaacctcttgaatctaaatcaaaatatacaattggatgcaacaagtgttgcgaaagcccaactgttacatagtatgattcaagtccttagcaacaacaatacctcttcttcctttgacattcatcacacaaccaataatctctttggccaatcttctttcttagagaacctaccaaatattgaaaatccttatgatcaaacccaaggcctctctcacattgacgatcagcctctggattcgttttctagcccgattcgagtagttgcttatcaacatgatcagaattttattccgcccttgatttcgacatctcctgatgagtctaaggaaacccaaatgatggtcaagaacaaggaaatcatgaagtataatgatcatacttcaaacccttcgtcgacctcaacttttacacaagatcaccagccatggtgtgacataattgatgatgaagcaagtgattcttattggaaagagatcatagagcaaacttgttcggagccttggccatttcgtgaatag

SEQ ID NO: 799 - protein, 321 aa, Arabidopsis thaliana
MGRSPCCDESGLKKGPWTPEEDQKLINHIRKHGHGSWRALPKQAGLNRCGKSCRLRWTNYLRPDIKRGNFTAEEEQTIINLHSLLGNKWSSIAGHLPGRTDNEIKNYWNTHIRKKLIQMGIDPVTHRPRTDHLNVLAALPQLLAAANFNNLLNLNQNIQLDATSVAKAQLLHSMIQVLSNNNTSSSFDIHHTTNNLFGQSSFLENLPNIENPYDQTQGLSHIDDQPLDSFSSPIRVVAYQHDQNFIPPLISTSPDESKETQMMVKNKEIMKYNDHTSNPSSTSTFTQDHQPWCDIIDDEASDSYWKEIIEQTCSEPWPFRE

SEQ ID NO: 800 - DNA, 573 bp, Arabidopsis thaliana
atgacttcttcaatccatgagctttctgataacattggaagtcatgagaagcaagaacagagagattctcatttccaaccaccaatcccttctgcaagaaattatgaatcaattgttacaagtttagtctactcagacccggggactacaaattccatggcacctggacaatatccatatccagatccttactacagaagcatatttgcaccgcctccacaaccgtataccggggtacatctacagttgatgggagtgcagcaacaaggcgttcctttaccatctgatgcagtcgaggaacctgtttttgttaacgcaaagcaataccacggtatactaaggcgcagacaatcaagagcaagacttgagtctcagaataaagtcatcaagtcacgtaagccgtatttgcatgaatctcggcatttgcatgcgataagacgaccaagaggatgtggcgggcggtttctaaatgccaagaaggaggatgagcatcacgaagacagtagtcatgaagaaaaatccaaccttagcgctggtaaatccgccatggctgcttctagtggtacatcttga

SEQ ID NO: 801 - protein, 190 aa, Arabidopsis thaliana
MTSSIHELSDNIGSHEKQEQRDSHFQPPIPSARNYESIVTSLVYSDPGTTNSMAPGQYPYPDPYYRSIFAPPPQPYTGVHLQLMGVQQQGVPLPSDAVEEPVFVNAKQYHGILRRRQSRARLESQNKVIKSRKPYLHESRHLHAIRRPRGCGGRFLNAKKEDEHHEDSSHEEKSNLSAGKSAMAASSGTS

SEQ ID NO: 802 - DNA, 1077 bp, Arabidopsis thaliana
ccaaaccaacacctgcaaatcctctctctctctctcactccaagaaaccaaaaaaaaagatgtcagtcaaccattaccacaacactctctcgttgcatcatcaccaccaaaacgacgtagctatagcacaacgagagtctttgttcgagaaatcactcacaccaagcgacgtcggaaagctaaaccgcttagtcataccaaaacaacacgccgagaaatacttccctctcaataataataataataatggcggcagcggagatgacgtggcgacgacggagaaagggatgcttcttagcttcgaggatgagtcaggcaagtgttggaaattcagatactcttattggaacagtagccaaagctacgtgttgaccaaaggatggagcaggtacgtcaaagacaaacacctcgacgcaggcgacgttgttttctttcaacgtcaccgttttgatctccatagactcttcattggctggcggagacgcggtgaagcttcttcctctcccgctgtctccgttgtgtctcaagaagctctagttaatacgacggcgtattggagcggcttgactacaccttatcgtcaagtacacgcgtcaactacttaccctaatattcaccaagagtattcacactatggcgccgtcgttgatcatgctcagtcgataccaccggtggtcgcaggtagctcgaggacggtgaggctttttggcgtgaacctcgaatgtcatggtgatgccgtcgagccaccaccgcgtcctgatgtctataatgaccaacacatttactattactcaactcctcatcccatgaatatatcatttgctggggaagcattggagcaggtaggagatggacgaggttgatgactgacattcaaaaagaagtgacaactttctagatttttaactttagaatttagattatgggcccatacttggcccaattgtcatagagaaaaaatggacaagaattaatattattagtagcttcgttatgtatttagtatttaactaatttgaaaataaaaataaaagatgagattttgtttctaaaaaaaaaaaaaaaaaaaaaaaaaaa

SEQ ID NO: 803 - protein, 267 aa, Arabidopsis thaliana
MSVNHYHNTLSLHHHHQNDVAIAQRESLFEKSLTPSDVGKLNRLVIPKQHAEKYFPLNNNNNNGGSGDDVATTEKGMLLSFEDESGKCWKFRYSYWNSSQSYVLTKGWSRYVKDKHLDAGDVVFFQRHRFDLHRLFIGWRRRGEASSSPAVSVVSQEALVNTTAYWSGLTTPYRQVHASTTYPNIHQEYSHYGAVVDHAQSIPPVVAGSSRTVRLFGVNLECHGDAVEPPPRPDVYNDQHIYYYSTPHPMNISFAGEALEQVGDGRG

SEQ ID NO: 804 - DNA, 1791 bp, Arabidopsis thaliana
atgtcaccgccgtcggcaaccgccggtgacatcaaccaccgtgaagtagacccgacgatctggcgcgcttgtgctggagcctccgtccagatccctgtccttcactctagggtttactactttccacaaggtcacgttgagcactgttgccctctcctctctactcttccttcctccacctcgccggttccatgtatcatcacttcaattcagttgctcgccgatccggtcaccgacgaggtctttgctcaccttattcttcaaccgatgacgcagcagcagtttactccgactaattattcacgattcggcagattcgatggcgatgttgatgataacaacaaggtgactaccttcgccaaaattctcacgccttctgatgctaacaatggaggtggcttctccgttcctcgtttctgtgctgattccgtcttccctctgcttaattttcaaatcgatccaccggttcagaagctctacgtcactgatatccatggagctgtttgggatttcaggcatatctatcgcggtacaccgaggcgtcacttgctaacaacgggatggagtaagttcgtcaatagcaagaagctcatcgctggagattcggtggtgtttatgagaaaatctgcagatgagatgttcatcggcgttaggagaactccgatctcaagcagcgacggaggaagtagctattacggaggagatgagtataacggttactacagtcagagtagcgttgccaaggaagatgatgggagtccgaagaagacgtttaggagatctgggaatggtaagttgactgctgaggctgtgacggatgcgatcaatagagcgtctcagggattaccatttgaggtggtgttttatccggctgctggatggtctgagtttgttgtgagagctgaagatgttgagtcttcaatgtctatgtattggactcctgggactcgagtcaagatggctatggagactgaagattcttctcggatcacatggtttcaaggcatcgtttcctctacttatcaggagaccggtccatggcgtggatctccatggaagcagcttcagatcacatgggatgaacctgagattctgcaaaacgtgaagagggtgaatccatggcaagtggaaattgctgcacatgcaactcaactgcatacccctttccctccagcaaagaggttgaagtatccacaacccggaggagggttcttgagtggagatgatggagaaatcctttatcctcaaagtggactgtctagtgcagcagcacctgatccaagtccttctatgttctcgtattctacatttcctgctggcatgcagggagccaggcaatatgattttgggtctttcaatccaaccggattcattggaggaaatcctccccagctattcaccaataacttcttaagtccgcttcctgatttgggaaaagtgtcgactgagatgatgaactttggcagtccgccatcagataacttatcgcctaatagcaacaccactaatctgtcctctggaaatgacctggttggaaaccgaggccccctttcaaagaaagttaactcgattcagttgtttggcaagatcattaccgtggaggagcattctgagagcggtcctgcagagtctggcttgtgtgaagaggatggcagcaaagagtccagcgacaatgagacacagttgtccttatcacatgctcctccaagcgtgcctaaacattccaacagcaacgcaggttctagctcccaaggtatattccgatctctctcaagtacaataatcaattga

SEQ ID NO: 805 - protein, 596 aa, Arabidopsis thaliana
MSPPSATAGDINHREVDPTIWRACAGASVQIPVLHSRVYYFPQGHVEHCCPLLSTLPSSTSPVPCIITSIQLLADPVTDEVFAHLILQPMTQQQFTPTNYSRFGRFDGDVDDNNKVTTFAKILTPSDANNGGGFSVPRFCADSVFPLLNFQIDPPVQKLYVTDIHGAVWDFRHIYRGTPRRHLLTTGWSKFVNSKKLIAGDSVVFMRKSADEMFIGVRRTPISSSDGGSSYYGGDEYNGYYSQSSVAKEDDGSPKKTFRRSGNGKLTAEAVTDAINRASQGLPFEVVFYPAAGWSEFVVRAEDVESSMSMYWTPGTRVKMAMETEDSSRITWFQGIVSSTYQETGPWRGSPWKQLQITWDEPEILQNVKRVNPWQVEIAAHATQLHTPFPPAKRLKYPQPGGGFLSGDDGEILYPQSGLSSAAAPDPSPSMFSYSTFPAGMQGARQYDFGSFNPTGFIGGNPPQLFTNNFLSPLPDLGKVSTEMMNFGSPPSDNLSPNSNTTNLSSGNDLVGNRGPLSKKVNSIQLFGKIITVEEHSESGPAESGLCEEDGSKESSDNETQLSLSHAPPSVPKHSNSNAGSSSQGIFRSLSSTIIN

SEQ ID NO: 806 - DNA, 1263 bp, Arabidopsis thaliana
gcaaaatcctcagatcgtcttaccttctccgaatcgatcgatttttcatggaggacgacgacgagattcagtcaattccatctccgggagattcttccctttcaccacaagctcctccttctccgccgattttgccaacaaacgacgtgacggtggccgtcgtgaagaaaccacaaccggggctttcttctcaatctccgtccatgaacgctttagcgttagtggttcatactccttctgtaaccggtggtggtggtagcggaaacagaaacggacgaggaggaggaggaggaagcggtggtggtggaggaggaagagatgattgttggagcgaagaagctacaaaggttctaatcgaagcttggggagatcgattctctgaaccaggtaaaggaactttgaagcaacaacattggaaagaagtagctgagattgtgaacaagagtcgtcaatgcaaataccctaaaactgatattcagtgtaagaacagaattgatacggtgaagaagaagtataagcaagagaaagctaagattgcttctggtgatggacctagtaaatgggttttcttcaagaagcttgagagtttgattggtggtactacaacattcattgcttcttcaaaagcttcagagaaggctcctatgggaggagctcttgggaatagccgttcgagtatgtttaaacggcaaactaaaggtaatcagattgtgcagcaacaacaagagaagagaggctctgattcgatgcggtggcattttaggaaacgtagtgcttctgagactgagtctgagtctgatcctgaacctgaggcttctcctgaggaatctgctgagagtctcccacctttgcaaccgattcaaccgctttcgtttcatatgccaaagcggttgaaggtggataagagtggaggtggagggagtggagttggagatgtggcgagggcgatacttggatttacggaagcttatgagaaggcggaaactgctaagcttaagttaatggcggaactggaaaaggagaggatgaaatttgctaaagagatggagttgcagagaatgcagttcttgaaaactcaattggagataacacagaacaatcaagaagaggaagagaggagcaggcagcgaggagaaaggaggatcgttgatgatgatgatgatcgcaatggcaagaataacggcaatgtaagtagctgacaattgaacacacaaatgttcctatgatatttgctatgataagctggattttaggttttgatgg

SEQ ID NO: 807 - protein, 383 aa, Arabidopsis thaliana
MEDDDEIQSIPSPGDSSLSPQAPPSPPILPTNDVTVAVVKKPQPGLSSQSPSMNALALVVHTPSVTGGGGSGNRNGRGGGGGSGGGGGGRDDCWSEEATKVLIEAWGDRFSEPGKGTLKQQHWKEVAEIVNKSRQCKYPKTDIQCKNRIDTVKKKYKQEKAKIASGDGPSKWVFFKKLESLIGGTTTFIASSKASEKAPMGGALGNSRSSMFKRQTKGNQIVQQQQEKRGSDSMRWHFRKRSASETESESDPEPEASPEESAESLPPLQPIQPLSFHMPKRLKVDKSGGGGSGVGDVARAILGFTEAYEKAETAKLKLMAELEKERMKFAKEMELQRMQFLKTQLEITQNNQEEEERSRQRGERRIVDDDDDRNGKNNGNVSS

SEQ ID NO: 808 - DNA, 1414 bp, Arabidopsis thaliana
cacgagcttctgactcagatccggcgatatcgaattccatggaggacgatgaagacatccgatctcagggttccgattcacctgatccgtcttcctccccgccggcgggacgaatcacggttacggtggcttcggcaggtccgccttcttattctctgactcctccgggtaattcgtcgcagaaggatccggatgcgttggctctggcgctgcttccgattcaggccagcggtggagggaataacagcagtgggagaccaaccggcggcggcgggagggaggattgttggagcgaagcagctacggctgtgttgattgatgcgtggggtgagagatacttggagcttagcagagggaatctgaagcagaagcactggaaagaggtggctgagattgtgagcagcagagaggattacggtaaaattcccaaaactgatatacagtgtaagaataggatcgatacggtgaagaagaagtataaacaagagaaggtgagaatcgctaacggcggtggccgtagcagatgggtgttcttcgacaagcttgaccgtctgattggatcaacggcgaagatcccgacggcaacttctggagtcagcggtcctgtcggaggattgcataagattcctatgggtattccaatgggaagtcgttcgaatctgtaccatcagcaagctaaggctgcaacaccgcctttcaataatcttgaccggttaattggagctacggctagagtctcagctgcttctttcggtggcagtggtggaggaggcggaggaggatctgtcaatgtacctatgggaattccgatgagtagccgttcagctccgtttggacagcaagggaggactctgccacagcaaggtaggacactgccacagcaacagcagcaagggatgatggtgaaaaggtgtagtgagtcgaaacgctggcgtttcaggaagaggaacgcttctgattcagactcggaatctgaagcagcaatgtcagatgattccggtgacagtttaccacctcctcctctgtcgaagaggatgaagacggaggagaagaagaagcaagatggtgatggagtggggaacaaatggagggagctgactcgggcaatcatgagattcggtgaagcttatgagcaaacagagaatgcgaaactgcaacaggtggttgagatggagaaagagaggatgaagttcttgaaggagcttgagttgcagagaatgcagttctttgtgaagactcaattggagatatcacaacttaagcagcaacatgggaggagaatgggaaacaccagtaatgatcatcatcacagccgcaagaacaacatcaatgcgattgtcaacaacaacaacgatttgggtaataactagaatttagtgatgcagtgtcgtaattgatatattttagatttgag

SEQ ID NO: 809 - protein, 443 aa, Arabidopsis thaliana
MEDDEDIRSQGSDSPDPSSSPPAGRITVTVASAGPPSYSLTPPGNSSQKDPDALALALLPIQASGGGNNSSGRPTGGGGREDCWSEAATAVLIDAWGERYLELSRGNLKQKHWKEVAEIVSSREDYGKIPKTDIQCKNRIDTVKKKYKQEKVRIANGGGRSRWVFFDKLDRLIGSTAKIPTATSGVSGPVGGLHKIPMGIPMGSRSNLYHQQAKAATPPFNNLDRLIGATARVSAASFGGSGGGGGGGSVNVPMGIPMSSRSAPFGQQGRTLPQQGRTLPQQQQQGMMVKRCSESKRWRFRKRNASDSDSESEAAMSDDSGDSLPPPPLSKRMKTEEKKKQDGDGVGNKWRELTRAIMRFGEAYEQTENAKLQQVVEMEKERMKFLKELELQRMQFFVKTQLEISQLKQQHGRRMGNTSNDHHHSRKNNINAIVNNNNDLGNN

SEQ ID NO: 810 - DNA, 972 bp, Arabidopsis thaliana
atggatgaaaaaggaagaagcttgaagaacaacaacatggaagacgagatggacctaaagagaggtccgtggactgctgaagaagattttaagctcatgaattacattgctactaatggagaaggtcgctggaactctctttctcgttgcgccggcctccaacgcaccggtaaaagctgtagactaaggtggttaaactatctccgccctgacgtccgccgtggaaacattacacttgaagaacaactcttgatcctcgaacttcattcccgttggggaaatagatggtcaaaaatcgcacaatatttaccgggaagaacggacaacgagatcaagaactactggaggacgcgggtgcaaaagcatgcgaaacagttgaaatgtgatgtgaatagccaacaattcaaagacacaatgaagtacttgtggatgcctcgactagtcgagaggattcagtcagcctcggcctcatccgcagcagcagccaccaccacaaccaccaccaccacaggatcagccggcacgtcatcttgcatcacaacctctaacaatcaattcatgaattacgactacaacaacaacaacatgggacaacagtttggtgtaatgagcaacaatgattatatcacgcctgaaaattccagcgtggcagtgtctccggcgtcagacttaacggagtactacagcgctccaaaccctaacccggaatactattcgggtcaaatggggaatagttattatccagatcagaatttagtgagttcacaattattaccggataattatttcgactatagtggattattagacgaagatctaacggctatgcaagagcagagtaacctcagctggtttgaaaacattaatggtgctgcttcttcttcagacagtttatggaacattggagaaactgatgaagaattctggttcttacagcagcaacaacagttcaacaataatggtagcttctga

SEQ ID NO: 811 - protein, 323 aa, Arabidopsis thaliana
MDEKGRSLKNNNMEDEMDLKRGPWTAEEDFKLMNYIATNGEGRWNSLSRCAGLQRTGKSCRLRWLNYLRPDVRRGNITLEEQLLILELHSRWGNRWSKIAQYLPGRTDNEIKNYWRTRVQKHAKQLKCDVNSQQFKDTMKYLWMPRLVERIQSASASSAAAATTTTTTTTGSAGTSSCITTSNNQFMNYDYNNNNMGQQFGVMSNNDYITPENSSVAVSPASDLTEYYSAPNPNPEYYSGQMGNSYYPDQNLVSSQLLPDNYFDYSGLLDEDLTAMQEQSNLSWFENINGAASSSDSLWNIGETDEEFWFLQQQQQFNNNGSF

SEQ ID NO: 812 - DNA, 999 bp, Arabidopsis thaliana
atgaggatggagatggtgcatgctgacgtggcgtctctctccataacaccttgcttcccgtcttctttgtcttcgtcctcacatcatcactataaccaacaacaacattgtatcatgtcggaagatcaacaccattcgatggatcagaccacttcatcggactacttctctttaaatatcgacaatgctcaacatctccgtagctactacacaagtcatagagaagaagacatgaaccctaatctaagtgattacagtaattgcaacaagaaagacacaacagtctatagaagctgtggacactcgtcaaaagcttcggtgtctagaggacattggagaccagctgaagatactaagctcaaagaactagtcgccgtctacggtccacaaaactggaacctcatagctgagaagctccaaggaagatccgggaaaagctgtaggcttcgatggtttaaccaactagacccaaggataaatagaagagccttcactgaggaagaagaagagaggctaatgcaagctcataggctttatggtaacaaatgggcgatgatagcgaggcttttccctggtaggactgataattctgtgaagaaccattggcatgttataatggctcgcaagtttagggaacaatcttcttcttaccgtaggaggaagacgatggtttctcttaagccactcattaaccctaatcctcacattttcaatgattttgaccctacccggttagctttgacccaccttgctagtagtgaccataagcagcttatgttaccagttccttgcttcccaggttatgatcatgaaaatgagagtccattaatggtggatatgttcgaaacccaaatgatggttggcgattacattgcatggacacaagaggcaactacattcgatttcttaaaccaaaccgggaagagtgagatatttgaaagaatcaatgaggagaagaaaccaccatttttcgattttcttgggttggggacggtgtga

SEQ ID NO: 813 - protein, 332 aa, Arabidopsis thaliana
MRMEMVHADVASLSITPCFPSSLSSSSHHHYNQQQHCIMSEDQHHSMDQTTSSDYFSLNIDNAQHLRSYYTSHREEDMNPNLSDYSNCNKKDTTVYRSCGHSSKASVSRGHWRPAEDTKLKELVAVYGPQNWNLIAEKLQGRSGKSCRLRWFNQLDPRINRRAFTEEEEERLMQAHRLYGNKWAMIARLFPGRTDNSVKNHWHVIMARKFREQSSSYRRRKTMVSLKPLINPNPHIFNDFDPTRLALTHLASSDHKQLMLPVPCFPGYDHENESPLMVDMFETQMMVGDYIAWTQEATTFDFLNQTGKSEIFERINEEKKPPFFDFLGLGTV

SEQ ID NO: 814 - DNA, 528 bp, Arabidopsis thaliana
atggcgacccaagattctcaagggattaaactctttggcaaaaccataacattcaacgccaacatcacacagacgataaaaaaagaagagcagcaacaacaacaacagccagagctacaagcaacaacagccgttagatcaccctcatcggatctgacggctgagaagcgtccagacaagatcataccatgtccgagatgcaagagcatggagactaagttttgttacttcaacaactacaacgttaatcaaccaagacacttctgcaaaggttgtcaacgttactggaccgccggtggagctctccggaatgttcccgtcggtgccggtcgtcggaagtcaaaacctcccggacgtgtcggtgggttcgctgagttgcttggagctgcgactggagctgttgatcaggtcgagctagatgctttgctagtggaagagtggagagctgctacggcgtctcacggtggtttccggcatgattttccggtgaagaggctccgttgttacaccgatggtcaatcttgttaa

SEQ ID NO: 815 - protein, 175 aa, Arabidopsis thaliana
MATQDSQGIKLFGKTITFNANITQTIKKEEQQQQQQPELQATTAVRSPSSDLTAEKRPDKIIPCPRCKSMETKFCYFNNYNVNQPRHFCKGCQRYWTAGGALRNVPVGAGRRKSKPPGRVGGFAELLGAATGAVDQVELDALLVEEWRAATASHGGFRHDFPVKRLRCYTDGQSC

SEQ ID NO: 816 - DNA, 890 bp, Arabidopsis thaliana
ctatctgaacatcgatcagtcatatcttttcaatcaaatcaaagccctcctctctctcttactccttttttgttttaaatcaagaaaaagactccatgtcgagcatgtccatgtcgtcctcctcagctccagcttttccaccggaccacttctcatctacggaccagctctgttacgtccattgcagcttctgcgacactgtccttgctgtgagtgttcctccgagtagtttgttcaagacggtgacggtcagatgcggccactgttcgaaccttttgtcggtgaccgtgagcatgagagctcttcttcttccatccgtttccaaccttggccattcctttttacctccccctcctcctcctcctcctccaaatcttttggaggaaatgcgaagcggagggcagaatataaacatgaacatgatgatgagccatcacgcttcagctcaccacccgaacgagcatttggttatggcgactcgcaacggaagatcagtggatcatctacaagagatgcctcggccaccaccagccaatagacccccagagaagcgacaaagagtaccatctgcatacaaccgattcatcaaagaggagatccaacgtataaaggcaggcaaccctgatatcagccacagagaagccttcagtgctgctgccaaaaactgggctcatttccctcacatacactttggactcatggctgaccatcctcccacgaagaaggctaacgtgcgccaacaggaaggagaggatgggatgatgggaagagaagggttttacggttcagctgccaacgttggggtggcccataactagctacgaagactttcccaatcttttgtaatcttcaaaatgtggttactttcagctcaaacttaacgcggccgc

SEQ ID NO: 817 - protein, 240 aa, Arabidopsis thaliana
MSSMSMSSSSAPAFPPDHFSSTDQLCYVHCSFCDTVLAVSVPPSSLFKTVTVRCGHCSNLLSVTVSMRALLLPSVSNLGHSFLPPPPPPPPPNLLEEMRSGGQNINMNMMMSHHASAHHPNEHLVMATRNGRSVDHLQEMPRPPPANRPPEKRQRVPSAYNRFIKEEIQRIKAGNPDISHREAFSAAAKNWAHFPHIHFGLMADHPPTKKANVRQQEGEDGMMGREGFYGSAANVGVAHN

SEQ ID NO: 818 - DNA, 849 bp, Arabidopsis thaliana
atggacccgtcgtcaagctccagagcacggtcaatgccaccgccggtgcctatggagggattgcaggaagcagggccttctccttttctaacaaagacgttcgagatggttggtgatccaaacacaaaccacattgtgtcttggaacaggggaggcatcagttttgtcgtgtgggatccacattccttctcggccactattctgcctctatacttcaagcacaacaacttctccagctttgtcagacaacttaacacttatggattcagaaagatcgaggcagagagatgggagtttatgaatgaaggtttcttgatgggtcagagggaccttctcaaaagcatcaagcgacgaacctcctcttcttcccctccttcgcttaactactctcagtctcagcccgaggctcatgacccaggcgtcgagcttccgcagctccgagaagagaggcatgtcctaatgatggagatctcgacgctcagacaggaggagcaaagagcgagaggctacgtccaagccatggagcagaggattaatggagcagagaagaaacagaggcatatgatgtccttcttgaggcgtgcggtggagaatccttcccttctgcagcagattttcgagcagaagagagaccgagaggaggccgcgatgattgatcaggctggcttgatcaaaatggaagaggtggagcacctgtcggagctggaggctctggcgcttgagatgcaaggatatggacggcaacggactgatggtgtggagagggagcttgacgacgggttttgggaagagttactcatgaacaatgaaaactccgacgaagaagaggcgaatgtgaagcaagattag

SEQ ID NO: 819 - protein, 282 aa, Arabidopsis thaliana
MDPSSSSRARSMPPPVPMEGLQEAGPSPFLTKTFEMVGDPNTNHIVSWNRGGISFVVWDPHSFSATILPLYFKHNNFSSFVRQLNTYGFRKIEAERWEFMNEGFLMGQRDLLKSIKRRTSSSSPPSLNYSQSQPEAHDPGVELPQLREERHVLMMEISTLRQEEQRARGYVQAMEQRINGAEKKQRHMMSFLRRAVENPSLLQQIFEQKRDREEAAMIDQAGLIKMEEVEHLSELEALALEMQGYGRQRTDGVERELDDGFWEELLMNNENSDEEEANVKQD

SEQ ID NO: 820 - DNA, 1404 bp, Arabidopsis thaliana
atgagcaatactttcgaagaatcactcaaatctatgtcattggattacctaaacctcttaatcaacggtcaagctttctccgatgtcactttcagcgtcgaaggccgtctagtccacgctcaccgttgcatcctcgctgctcgtagcctcttcttccgcaaattcttctgtgaatctgatccttcgcaacccggagctgaacccgctaaccaaaccggatcaggagccagagcagccgcagtaggaggagtcataccggttaactcagtcggttacgaagttttcttacttctacttcaattcttgtacagtggtcaagtctcaattgtaccacataagcacgagccaagatcgaattgtggagatagaggatgctggcacacgcattgcactgcagccgtcgatctctctttagatattttagccgccgctcgctactttggcgtcgagcagctcgcgttgcttactcagaaacatttgacaagtatggtggagaaagcctccattgaagatgtgatgaaagtgctcatagcttcaagaaagcaagacatgcatcaattatggactacttgctcttacttaatcgccaaatccggtcttccacaagagattctagccaaacatctcccaatcgaacttgtagccaagattgaggagctccgtctcaaatcttcaatgcctctccgttcactaatgcctcaccaccatgacctaacctcgactttagacctcgaagaccagaagatcaggaggatgagacgtgcattggactcctctgatgtcgagcttgtgaagctaatggtgatgggagaaggactcaatctagatgagtccctagctttgatttacgcggttgaaaattgtagtagagaggttgtaaaggcacttcttgagcttggagcagctgatgtgaactatcccgcgggtcccacagggaaaaccgctcttcacattgcggctgaaatggtgtctccggacatggtggctgttttactcgaccaccacgccgaccctaacgtccagacagtggatggaatcactcctctcgacatccttcgaaccctaacgtcagattttttgttcaagggggcaattcctggattgactcacattgagcccaataagcttaggctttgtctcgagctggtccagtccgcggcattggttatatcacgcgaagaaggaaacaataacagtaacgataacaacacaatgatctaccctaggatgaaagacgaacacacgagcggaagtagtttggattcaagattggtttatctgaatcttggtgctacaaatcgtgatattggagatgacaatagcaatcaaagggaaggaatgaatctgcatcatcatcatcatgacccatcaacgatgtatcatcaccaccaccaccatttctag

SEQ ID NO: 821 - protein, 467 aa, Arabidopsis thaliana
MSNTFEESLKSMSLDYLNLLINGQAFSDVTFSVEGRLVHAHRCILAARSLFFRKFFCESDPSQPGAEPANQTGSGARAAAVGGVIPVNSVGYEVFLLLLQFLYSGQVSIVPHKHEPRSNCGDRGCWHTHCTAAVDLSLDILAAARYFGVEQLALLTQKHLTSMVEKASIEDVMKVLIASRKQDMHQLWTTCSYLIAKSGLPQEILAKHLPIELVAKIEELRLKSSMPLRSLMPHHHDLTSTLDLEDQKIRRMRRALDSSDVELVKLMVMGEGLNLDESLALIYAVENCSREVVKALLELGAADVNYPAGPTGKTALHIAAEMVSPDMVAVLLDHHADPNVQTVDGITPLDILRTLTSDFLFKGAIPGLTHIEPNKLRLCLELVQSAALVISREEGNNNSNDNNTMIYPRMKDEHTSGSSLDSRLVYLNLGATNRDIGDDNSNQREGMNLHHHHHDPSTMYHHHHHHF

SEQ ID NO: 822 - DNA, 1588 bp, Arabidopsis thaliana
cacctaaaaataaaagcttataattaaagaaccataaagacgaacacaaaagaaactctcacattctcaagagtttctttcttctttcaatggctttactaactttcttgccggagaacgcagaggcgccacaaaaacacaagccaacgtctagcaaacgaaagaaacgcgataatcccaccgaccaaacgcagacacagaaacataaaccgcagaaaccgaagaaagcagtacctccgaagcagccatcttcatgggaccaaatcaagaacctattgacttgcaaacaaatcgaagggtcaagagtccatgatccttccaagaactctcaatctggtccgtccatgacaactaacttatctccttccaagcttggctcgtcgtgcagctccatttgcagctttagagacgtggctcacggcaacactcgtgtggttcatagagctgatcactcaccagacgtaggtaactcggctactcctaactcggagactcggcttctgactcggaaacctggtcaacacggttcttcttcgtctcggtctcttacatctggctcaacgagatctaacgccagtgggagttacacgtcatcgtcaacgacttcgtttagagccatgcagttccgtaaactctccggatgttacgaatgtcacatgatcgttgacccgagcaggtatccgatttcgcctagggtttgtgcttgttcccaatgtggagaagttttccccaagcttgaaagcttagagcttcatcaagcagttcgtcacgcagtttcggagttaggtccggaggattcgggtcgaaacatagtggagatcatattcaaatcaagctggcttaaaaaagacagtcccatctgtcagatcgaacggatattaaaagtccacaacactcaacgtacgatccaacggtttgaggattgccgagacgcagtgaaggcgcgtgcacttcaagcaaccagaaaagatgctcgttgtgccgccgacggcaacgagctcttacgttttcactgcaccactctcacttgttcactcggagctcgtggctcttcttctctctgctctaacctccctgtttgtggcgtctgcaccgtgattcgccacggtttccaaggaaaatctggtggcggaggagccaacgtcgcaaacgccggtgtgaggacgacggcgagcagcggaagagctgatgatttgctgaggtgtagcgatgatgcgaggagagtgatgcttgtgtgccgtgtgatcgctgggagagttaagcgagttgatttaccggcggcggatgcttcggctacagcggagaagaagtcaacggtggaggataactcggtggttggagtttcttcgagtggtggtacgtttgactcggtggcggtcaatgctggagtttattcgaatcttgaggagcttgtggtttataacccgagagctatattaccttgcttcgtggttatttacaaagttttagaatcttgaatttgtaattttaacttgagaaataatgtttgttttttgtacttctaactttttaatattatagggagagattagggataatcatcaacctgcatcataattccgcggcc

SEQ ID NO: 823 - protein, 462 aa, Arabidopsis thaliana
MALLTFLPENAEAPQKHKPTSSKRKKRDNPTDQTQTQKHKPQKPKKAVPPKQPSSWDQIKNLLTCKQIEGSRVHDPSKNSQSGPSMTTNLSPSKLGSSCSSICSFRDVAHGNTRVVHRADHSPDVGNSATPNSETRLLTRKPGQHGSSSSRSLTSGSTRSNASGSYTSSSTTSFRAMQFRKLSGCYECHMIVDPSRYPISPRVCACSQCGEVFPKLESLELHQAVRHAVSELGPEDSGRNIVEIIFKSSWLKKDSPICQIERILKVHNTQRTIQRFEDCRDAVKARALQATRKDARCAADGNELLRFHCTTLTCSLGARGSSSLCSNLPVCGVCTVIRHGFQGKSGGGGANVANAGVRTTASSGRADDLLRCSDDARRVMLVCRVIAGRVKRVDLPAADASATAEKKSTVEDNSVVGVSSSGGTFDSVAVNAGVYSNLEELVVYNPRAILPCFVVIYKVLES

SEQ ID NO: 824 - DNA, 1026 bp, Arabidopsis thaliana
atgggttcttcgtcgaacggaggagtgccacctggtttccggtttcatccgacggacgaagagcttctccattactacttgaagaagaaaatctcttaccaaaagtttgagatggaagtcatcagagaggttgacttaaacaagcttgagccttgggatttgcaagagagatgcaagataggatcaacaccacaaaacgaatggtacttcttcagccacaaggacaggaaatatccgacggggtcaaggaccaaccgtgctactcatgcagggttctggaaggcgacgggacgtgacaagtgcataaggaactcttacaaaaagataggaatgaggaagacacttgtgttctacaaaggtagagctcctcatggccaaaagactgattggatcatgcatgagtaccgtcttgaagacgctgatgatcctcaagccaaccctagtgaagatggatgggtggtatgtagagtgtttatgaagaaaaatttgttcaaggtagtaaatgaaggtagctcaagcattaactcattggaccaacacaaccatgacgcatctaacaacaaccatgcacttcaagctcgtagctttatgcaccgagacagtccataccagctagtacgtaaccacggagccatgacattcgaacttaacaagcctgaccttgctcttcatcaatacccaccaatcttccacaagccaccttcacttggatttgactactcttcaggacttgcaagggacagtgagagtgcggctagtgaagggttacaataccagcaagcgtgtgagccgggtttagacgttggtacatgtgagacagtggctagtcataatcatcaacaaggtctaggtgaatgggcaatgatggatagacttgtgacttgtcacatgggaaatgaagattcctctagagggattacgtatgaggatggtaacaacaattcgtcctctgtggttcagccagttcccgcgacgaaccagctaacattgcgtagtgagatggatttctggggttattctaaatag

SEQ ID NO: 825 - protein, 341 aa, Arabidopsis thaliana
MGSSSNGGVPPGFRFHPTDEELLHYYLKKKISYQKFEMEVIREVDLNKLEPWDLQERCKIGSTPQNEWYFFSHKDRKYPTGSRTNRATHAGFWKATGRDKCIRNSYKKIGMRKTLVFYKGRAPHGQKTDWIMHEYRLEDADDPQANPSEDGWVVCRVFMKKNLFKVVNEGSSSINSLDQHNHDASNNNHALQARSFMHRDSPYQLVRNHGAMTFELNKPDLALHQYPPIFHKPPSLGFDYSSGLARDSESAASEGLQYQQACEPGLDVGTCETVASHNHQQGLGEWAMMDRLVTCHMGNEDSSRGITYEDGNNNSSSVVQPVPATNQLTLRSEMDFWGYSK

SEQ ID NO: 826 - DNA, 867 bp, Arabidopsis thaliana
ataacaaactctttaatgtcaccacagagaatgaagctatcatcaccaccagttaccaacaacgaaccaaccgccaccgcttctgccgttaaatcttgcggcggaggaggtaaagaaaccagctcatcgaccacgaggcatccagtgtaccacggagttcgcaaacgccgatggggaaaatgggtttctgagatcagagagccccggaaaaagtctcggatttggctcggatcttttccggtgccggagatggctgctaaggcctacgacgtggcagcgttttgtctaaaaggtagaaaagctcagctgaatttccctgaagaaatcgaggatctacctcgaccgtccacgtgtactcccagagatatccaagtcgcagcggccaaagcagccaacgccgtgaagatcatcaaaatgggagatgatgacgtggcaggaatagacgacggagatgatttctgggaaggcattgagctgcctgagcttatgatgagtggaggtgggtggtcgccggagccttttgttgccggagatgatgccacgtggcttgtcgacggagacttgtatcagtatcagttcatggcgtgtctgtgagtgttgctgtcgattgtgtcgtattcgttatacgtgtacgttgtatcgttattgtgttggctcacttaatttaatgcatatgcatgtatattttcatttatttgtttctagtttattgttttacgcgattaataattagatacctgtttctcaagttagttatcaggtttgtacgcatctacaaaaatacgtataagtgtatgttcttatatacagtttttgtttgcataagtattgctacttattctaaaaaaaaaaaaaaaaaaaaaaaaa

SEQ ID NO: 827 - protein, 192 aa, Arabidopsis thaliana
MSPQRMKLSSPPVTNNEPTATASAVKSCGGGGKETSSSTTRHPVYHGVRKRRWGKWVSEIREPRKKSRIWLGSFPVPEMAAKAYDVAAFCLKGRKAQLNFPEEIEDLPRPSTCTPRDIQVAAAKAANAVKIIKMGDDDVAGIDDGDDFWEGIELPELMMSGGGWSPEPFVAGDDATWLVDGDLYQYQFMACL

SEQ ID NO: 828 - DNA, 832 bp, Arabidopsis thaliana
aacttagtgccacttagacacaataagaaaaccgttaacaagaagaaaaaaaaaagatcgaaaatggaatatcaaactaacttcttaagtggagagttttccccggagaactcttcttcaagctcatggagctcacaagaatcattcttgtgggaagagagtttcttacatcaatcatttgaccaatccttccttttatctagccctactgataactactgtgatgacttctttgcatttgaatcatcaatcataaaagaagaaggaaaagaagccaccgtggcggccgaggaggaggagaagtcatacagaggagtgaggaaacggccgtgggggaaattcgcggccgagataagagactcaacgaggaaagggataagagtgtggcttgggacattcgacaccgcggaggcggcggctctcgcttatgatcaggcggctttcgctttgaaaggcagcctcgcagtactcaatttccccgcggatgtcgttgaagaatctctccggaagatggagaatgtgaatctcaatgatggagagtctccggtgatagccttgaagagaaaacactccatgagaaaccgtcctagaggaaagaagaaatcttcttcttcttcgacgttgacatcttctccttcttcctcctcctcctattcatcttcttcgtcttcttcttctttgtcgtcaagaagtagaaaacagagtgttgttatgacgcaagaaagtaatacaacacttgtggttcttgaggatttaggtgctgaatacttagaagagcttatgagatcatgttcttgataatctctgcttctacaatttttatgtaatttga

SEQ ID NO: 829 - protein, 244 aa, Arabidopsis thaliana
MEYQTNFLSGEFSPENSSSSSWSSQESFLWEESFLHQSFDQSFLLSSPTDNYCDDFFAFESSIIKEEGKEATVAAEEEEKSYRGVRKRPWGKFAAEIRDSTRKGIRVWLGTFDTAEAAALAYDQAAFALKGSLAVLNFPADVVEESLRKMENVNLNDGESPVIALKRKHSMRNRPRGKKKSSSSSTLTSSPSSSSSYSSSSSSSSLSSRSRKQSVVMTQESNTTLVVLEDLGAEYLEELMRSCS

SEQ ID NO: 830 - DNA, 841 bp, Arabidopsis thaliana
tttcaacagtaatttaagttaaccggagtctctttttgttttccggcgaatttttggtactttgagttatgaataatgatgatattattctggcggagatgaggcctaagaagcgtgcgggaaggagagtgtttaaggagacacgtcacccagtttacagaggcataaggcggaggaacggtgacaaatgggtctgcgaagtcagagaaccgacgcaccaacgccgcatttggctcgggacttatcccacagcagatatggcagcgcgtgcacacgacgtggcggttttagctctgcgtgggagatccgcatgtttgaatttcgccgactccgcttggcggcttccggtgccggaatccaatgatccggatgtgataagaagagttgcggcggaagctgcggagatgtttaggccggtggatttagaaagtggaattacggttttgccttgtgcgggagatgatgtggatttgggttttggttcgggttccggctctggttcgggatcggaggagaggaattcttcttcgtatggatttggagactacgaagaagtctcaacgacgatgatgagactcgcggaggggccactaatgtcgccgccgcgatcgtatatggaagacatgactcctactaatgtttacacggaagaagagatgtgttatgaagatatgtcattgtggagttacagatattaagtgggactcacatatctactatacataatatttagcttttatgtaagaggtatttatgtgagttttaagattgtagatgtgtcccaggcgttagaagtttccttgatggtatggaatctttgtacctataaaattataaaatt

SEQ ID NO: 831 - protein, 209 aa, Arabidopsis thaliana
MNNDDIILAEMRPKKRAGRRVFKETRHPVYRGIRRRNGDKWVCEVREPTHQRRIWLGTYPTADMAARAHDVAVLALRGRSACLNFADSAWRLPVPESNDPDVIRRVAAEAAEMFRPVDLESGITVLPCAGDDVDLGFGSGSGSGSGSEERNSSSYGFGDYEEVSTTMMRLAEGPLMSPPRSYMEDMTPTNVYTEEEMCYEDMSLWSYRY

SEQ ID NO: 832 - DNA, 786 bp, Arabidopsis thaliana
atgggaagaggaagggttcagctacggcggatcgagaataagataaggagacaagtgacattttcaaagcgaaggaccggtttggtaaagaaagctcaagagatctcagtgttatgtgatgctgaagttgctttgattgttttctcccccaaaggcaaactctttgagtactctgctggttccagcatggagagaattcttgatcgatatgagaggtctgcctacgccggtcaagatattcctacaccaaatttggattcacagggagagtgctcaacagaatgttcaaagctcttgaggatgattgatgtcctgcaaagaagcctgaggcacttaagaggagaagaggtggatggtctaagtatcagagaccttcaaggtgtggagatgcaacttgatactgccctcaagaaaactcgctctagaaagaaccagctcatggtagagtccatagcacagcttcagaaaaaggagaaggaactaaaagaactgaagaaacagctaacaaagaaggctggtgaaagggaagactttcaaacgcaaaacctcagccatgacttagcctccttggcaacaccgccatttgaatcaccccatgagcttcgccggacaatatctcctcctcctcctcctttatcttcgggggatacatcacaaagggatggagttggagaagtagctgccggaaccctaattcgaaggacgaatgcaacgttgcctcattggatgccccagctcaccggagaatagaggtccgaaacaatcttggttttttaaatttttctg

SEQ ID NO: 833 - protein, 249 aa, Arabidopsis thaliana
MGRGRVQLRRIENKIRRQVTFSKRRTGLVKKAQEISVLCDAEVALIVFSPKGKLFEYSAGSSMERILDRYERSAYAGQDIPTPNLDSQGECSTECSKLLRMIDVLQRSLRHLRGEEVDGLSIRDLQGVEMQLDTALKKTRSRKNQLMVESIAQLQKKEKELKELKKQLTKKAGEREDFQTQNLSHDLASLATPPFESPHELRRTISPPPPPLSSGDTSQRDGVGEVAAGTLIRRTNATLPHWMPQLTGE

SEQ ID NO: 834 - DNA, 931 bp, Arabidopsis thaliana
tcctcactctctctctttttctctaaccataaaatctctttgatctctttctctgtgttttgataatggaaaatgttggtgttgggatgccgttttacgatttagggcaaacaagggtttacccactcttgtctgatttccacgatttatcggcggagaggtatccggtagggttcatggatttactgggtgttcatcgtcatacacccacccatacgccgttgatgcattttccgaccacacctaactcgtcctcgagcgaagctgtgaatggagatgacgaagaagaagaagatggagaagaacagcagcataagacaaagaagcggtttaaattcactaaaatgagtagaaagcagacgaagaagaaggtgccaaaagtgtcattcatcacgaggagtgaggttcttcatctagatgatggttataagtggagaaaatacggtcaaaaacctgtcaaagacagcccttttccaagaaattattaccgttgcacaacaacttggtgtgacgtgaagaagagagtagagagatcattcagtgatccaagcagtgtaatcaccacttacgaaggtcaacatactcatcctcgtccactactcatcatgcccaaagaaggcagctctccatccaatggctcagcttctagggcccacattggcctccctacactccctcctcagcttttagattacaacaaccaacaacaacaagcgccgtcttcttttggaaccgagtacattaacaggcaagaaaaaggaattaatcatgatgatgatgacgatcatgttgtgaagaagagtcgaactcgggatctgctggatggagctggtttagtcaaagatcatggccttcttcaggatgttgttccctctcatatcattaaggaagagtattagttaatcgcataattatgtagctagctagctag

SEQ ID NO: 835 - protein, 277 aa, Arabidopsis thaliana
MENVGVGMPFYDLGQTRVYPLLSDFHDLSAERYPVGFMDLLGVHRHTPTHTPLMHFPTTPNSSSSEAVNGDDEEEEDGEEQQHKTKKRFKFTKMSRKQTKKKVPKVSFITRSEVLHLDDGYKWRKYGQKPVKDSPFPRNYYRCTTTWCDVKKRVERSFSDPSSVITTYEGQHTHPRPLLIMPKEGSSPSNGSASRAHIGLPTLPPQLLDYNNQQQQAPSSFGTEYINRQEKGINHDDDDDHVVKKSRTRDLLDGAGLVKDHGLLQDVVPSHIIKEEY

SEQ ID NO: 836 - DNA, 908 bp, Arabidopsis thaliana
caaagtgaaaacataagatcatcttcttcgttgatagatcaatataggaactccagaagagaatcttgatcaattaagtatcatgtctcacatcgctgttgaaaggaatcgaagaaggcaaatgaacgagcatcttaaatcccttcgttctttgactccttgtttctacatcaaaaggggagatcaagcttcgatcatcggaggagtgatagagttcatcaaagagttgcagcaattggttcaagttcttgagtccaagaaacgtcgaaagaccctaaaccgaccatctttcccttatgatcaccagacaatcgagccatccagtttaggagccgccactacccgagtaccgtttagtcgaatcgaaaatgtgatgaccacaagtactttcaaggaagtaggagcatgctgtaactcccctcatgctaacgtagaagcaaagatttcaggttctaatgttgtattgagagttgtctctaggcgaatcgtggggcagctcgtaaagatcatctctgtcttagagaagctatcttttcaagttcttcacctcaatattagtagcatggaggagactgtcttatactttttcgttgttaagataggattggagtgtcacttaagcttggaggagctaactcttgaagttcagaaaagctttgtgtctgatgaagtgatcgtctctaccaattaaaaacaaaattctacatgtactagagcgtgtatcgttttttgggattaataatcatataatcgttacatgagccttgatactttgctagaaataagctcctctaaacaaaaccttctttttaaaaaaacacacttatgttttacttagtttgttgttgtatccgaagttgatcaacgttgtaatttcccacaataaatcatgacattttatatgctct

SEQ ID NO: 837 - protein, 202 aa, Arabidopsis thaliana
MSHIAVERNRRRQMNEHLKSLRSLTPCFYIKRGDQASIIGGVIEFIKELQQLVQVLESKKRRKTLNRPSFPYDHQTIEPSSLGAATTRVPFSRIENVMTTSTFKEVGACCNSPHANVEAKISGSNVVLRVVSRRIVGQLVKIISVLEKLSFQVLHLNISSMEETVLYFFVVKIGLECHLSLEELTLEVQKSFVSDEVIVSTN

SEQ ID NO: 838 - DNA, 1197 bp, Arabidopsis thaliana
aaggagttttgcatactcaccaagccacaatcatttctctcttctctatctctctggttttgaatcggcgacgactgagtcaactcggtgttgttactggtttcgtcgtatgtgttgtaactgattaagttgatggatccgagtgggatgatgaacgaaggaggaccgtttaatctagcggagatctggcagtttccgttgaacggagtttcaaccgccggagattcttctagaagaagcttcgttggaccgaatcagttcggtgatgctgatctaaccacagctgctaacggtgatccagcgcgtatgagtcacgcgttgtctcaggcggttattgaaggtatctccggcgcttggaaacggagggaagatgagtctaagtcggcgaagatcgtctccaccattggcgctagtgaaggtgagaacaaaagacagaagatagatgaagtgtgtgatgggaaagcagaagcagaatcgctaggaacagagacggaacaaaagaagcaacagatggaaccaacgaaagattatattcatgttcgagctagaagaggtcaagctactgatagtcacagtttagctgaaagagcgagaagagagaaaataagtgagcggatgaaaatcttgcaagatcttgttccgggatgtaacaaggttattggaaaagcacttgttctagatgagataattaactatatacaatcattgcaacgtcaagttgagttcttatcgatgaagcttgaagcagtcaactcaagaatgaaccctggtatcgaggtttttccacccaaagaggtgatgattctcatgatcatcaactcaatcttctccatttttttcacaaaacaatacatgtttctatcgaggtattctcggggtaggagtctcgatgtttatgcggttcggtcatttaagcattgcaataaacggagtgacctctgtttttgctcctgctccccaaaaacagaacttaagacaactatattttcacaaaacatgacatgtttctgtcgatattctcgagtaggagtcgctattagttcatctaagcattgcaatgaaccgtttggtcagcaagcgtttgagaatccggagatacagttcgggtcgcagtctacgagggaatacagtagaggagcatcaccagagtggttgcacatgcagataggatcaggtggtttcgaaagaacgtcttga

SEQ ID NO: 839 - protein, 354 aa, Arabidopsis thaliana
MDPSGMMNEGGPFNLAEIWQFPLNGVSTAGDSSRRSFVGPNQFGDADLTTAANGDPARMSHALSQAVIEGISGAWKRREDESKSAKIVSTIGASEGENKRQKIDEVCDGKAEAESLGTETEQKKQQMEPTKDYIHVRARRGQATDSHSLAERARREKISERMKILQDLVPGCNKVIGKALVLDEIINYIQSLQRQVEFLSMKLEAVNSRMNPGIEVFPPKEVMILMIINSIFSIFFTKQYMFLSRYSRGRSLDVYAVRSFKHCNKRSDLCFCSCSPKTELKTTIFSQNMTCFCRYSRVGVAISSSKHCNEPFGQQAFENPEIQFGSQSTREYSRGASPEWLHMQIGSGGFERTS

SEQ ID NO: 840 - DNA, 992 bp, Arabidopsis thaliana
attctccacaatttcataactttcttccgctcaacttcagataaattcggattctgtagctctttcaatacgactgcggagatcagagccaattatttggttatggcgtctctgatctcagatattgaaccgccgacgagtactacttcagatctcgttcggagaaagaagagatcctctgcttcatccgccgcatcgtctcgttcaagcgcatcttccgtctccggtgagattcacgcgcgatggcgatcggagaagcaacaacggatctactcagccaaactgttccaagcgctccaacaagtccgcctcaactcttccgcctcaacatcatcatctccaacggctcagaaacgaggaaaggccgtccgtgaagccgccgatcgagctcttgccgtttccgctcggggaagaacactctggagcagagcgatcttagctaatcggatcaaactgaaatttcgtaaacagagacgtcctcgagctacgatggcgattccggccatgactacggtggttagtagcagcagcaacagatcgagaaaacggagagtgtcggtgttgagattgaataagaagagtataccggatgttaaccggaaagtacgtgttctaggccggttagttcccggttgcggtaaacaatccgtaccggtgattctagaagaagcaactgattatattcaggctctggagatgcaagtgagagccatgaactctttagttcagcttctctcctcctacggctcagctcctccaccgatttgatgaggttaaaatcgtctttttaattctaccatctctcgatctttcacagcttatgtgtatatagaagattcggtttgattataatctgtaactactcttcccaaccgctgattcttctctgctacaagtaaaagtaaattttgaaccgagtcttcccatttttacgatcctcaagtctaaattaagtatatgattgattaataaagtctttaccattagggttc

SEQ ID NO: 841 - protein, 221 aa, Arabidopsis thaliana
MASLISDIEPPTSTTSDLVRRKKRSSASSAASSRSSASSVSGEIHARWRSEKQQRIYSAKLFQALQQVRLNSSASTSSSPTAQKRGKAVREAADRALAVSARGRTLWSRAILANRIKLKFRKQRRPRATMAIPAMTTVVSSSSNRSRKRRVSVLRLNKKSIPDVNRKVRVLGRLVPGCGKQSVPVILEEATDYIQALEMQVRAMNSLVQLLSSYGSAPPPI

SEQ ID NO: 842 - DNA, 975 bp, Arabidopsis thaliana
atggataatataatgcaatcgtcaatgccaccgggattccgatttcatccgacagaggaagagcttgtgggttattacctagataggaagatcaattcaatgaagagtgctttagatgtcattgtagagattgatctctacaaaatggagccatgggatatacaagcgaggtgtaaactagggtatgaagagcaaaacgagtggtacttctttagtcataaggacaggaagtaccctaccgggactaggaccaaccgagccactgcggctgggttctggaaagccacgggtagagacaaggcggtactatcaaaaaacagtgtcatcggaatgcggaagacacttgtctactacaagggtcgagctcctaatggaagaaagtccgattggatcatgcacgaataccgtctccaaaactccgagcttgccccggttcaggaggaaggctgggtggtgtgtcgagcatttaggaagccaattccaaaccagaggccattagggtacgagccatggcagaaccagctctaccacgtcgaaagtagtaacaactactcatcttcagtgacaatgaacacgagtcatcatatcggtgcatcttcatcaagtcataaccttaatcaaatgctcatgagcaataaccactacaatcctaataatacatcctcatcgatgcatcaatatggcaacattgagctcccgcagttggacagcccgagcttgtcgcctagtttagggacgaataaagatcagaacgagagtttcgagcaagaagaagagaagagctttaactgtgtggattggagaacactagataccttgcttgagacacaagtcatacatccgcataaccctaatattcttatgttcgaaacgcagtcgtataatccggcgccaagcttcccttccatgcatcaaagctataatgaggtcgaagctaatattcatcattctcttggatgcttccctgactcgtaa

SEQ ID NO: 843 - protein, 324 aa, Arabidopsis thaliana
MDNIMQSSMPPGFRFHPTEEELVGYYLDRKINSMKSALDVIVEIDLYKMEPWDIQARCKLGYEEQNEWYFFSHKDRKYPTGTRTNRATAAGFWKATGRDKAVLSKNSVIGMRKTLVYYKGRAPNGRKSDWIMHEYRLQNSELAPVQEEGWVVCRAFRKPIPNQRPLGYEPWQNQLYHVESSNNYSSSVTMNTSHHIGASSSSHNLNQMLMSNNHYNPNNTSSSMHQYGNIELPQLDSPSLSPSLGTNKDQNESFEQEEEKSFNCVDWRTLDTLLETQVIHPHNPNILMFETQSYNPAPSFPSMHQSYNEVEANIHHSLGCFPDS

SEQ ID NO: 844 - DNA, 1005 bp, Arabidopsis thaliana
atgaacatatcagtaaacggacagtcacaagtacctcctggctttaggtttcacccaaccgaggaagagctcttgaagtattacctccgcaagaaaatctctaacatcaagatcgatctcgatgttattcctgacattgatctcaacaagctcgagccttgggatattcaagagatgtgtaagattggaacgacgccgcaaaacgattggtacttttatagccataaggacaagaagtatcccaccgggactagaaccaacagagccaccacggtcggattttggaaagcgacgggacgtgacaagaccatatataccaatggtgatagaatcgggatgcgaaagacgcttgtcttctacaaaggtcgagcccctcatggtcagaaatccgattggatcatgcacgaatatagactcgacgagagtgtattaatctcctcgtgtggcgatcatgacgtcaacgtagaaacgtgtgatgtcataggaagtgacgaaggatgggtggtgtgtcgtgttttcaagaaaaataacctttgcaaaaacatgattagtagtagcccggcgagttcggtgaaaacgccgtcgttcaatgaggagactatcgagcaacttctcgaagttatggggcaatcttgtaaaggagagatagttttagaccctttcttaaaactccctaacctcgaatgccataacaacaccaccatcacgagttatcagtggttaatcgacgaccaagtcaacaactgccacgtcagcaaagttatggatcccagcttcatcactagctgggccgctttggatcggctcgttgcctcacagttaaatgggcccaactcgtattcaataccagccgttaatgagacttcacaatcaccgtatcatggactgaaccggtccggttgtaataccggtttaacaccagattactatataccggagattgatttatggaacgaggcagatttcgcgagaacgacatgccacttgttgaacggtagtggataa

SEQ ID NO: 845 - protein, 334 aa, Arabidopsis thaliana
MNISVNGQSQVPPGFRFHPTEEELLKYYLRKKISNIKIDLDVIPDIDLNKLEPWDIQEMCKIGTTPQNDWYFYSHKDKKYPTGTRTNRATTVGFWKATGRDKTIYTNGDRIGMRKTLVFYKGRAPHGQKSDWIMHEYRLDESVLISSCGDHDVNVETCDVIGSDEGWVVCRVFKKNNLCKNMISSSPASSVKTPSFNEETIEQLLEVMGQSCKGEIVLDPFLKLPNLECHNNTTITSYQWLIDDQVNNCHVSKVMDPSFITSWAALDRLVASQLNGPNSYSIPAVNETSQSPYHGLNRSGCNTGLTPDYYIPEIDLWNEADFARTTCHLLNGSG

SEQ ID NO: 846 - DNA, 960 bp, Arabidopsis thaliana
atggcgattccacaaagaaacaagcgcaaagcaagatcctcgccggaacggctaacacaaccgccggaactaccacacaactccgacgttccttcttcttcgtcttcttctgccgctgataatttcttttcttggtcgacgaaacagtttgctttcccgccaggttatagatttgtaccaaaggaccaagaactcatctttcattacttgaaacccttttcgcaaggcaataaatgctcattgctcaatgttcctatccatcgtgtgaacatctacgagtcaaatccacaacatctttcagagaaatatgagaagggtaatgataaagattggttctatatatcggagaggaccaagaccggtaaggctggaagaagtaataaacgtgtcgacaatggaggatattggagcgcaactgtagctgcccaaaagatcaacgctggaaatggcatagtcggctacaagacttcactagagtactatgttgggaaacaatcaaatagtgtcaaaggggattggttaatgcaagagtactggtttgagtcttctgatgataacaacaacgagaaggtggatcatgctttgtgcaagatttatctgactccagcggcagcaaagaagaagaaagctgaggaagcagagaatgagaagctgaagaaagaagaagacgttgagcagctggatttgaatcaaccagaccaattgcagctgcaacagcctcatgatattgtgtatcaaccgcagtattgtttacttccagaacatcatcagccgcagccttttcctgataacttttctgagttgatcagctttcaacagcaaccagtgatgatcccagacgattttgaagatttcttggctgaattcactaaaccacattcactggatggagatgaagaattcaacaattatggtttgtttgaaggcttctttgacacagaaggaatgataaaacattaa

SEQ ID NO: 847 - protein, 319 aa, Arabidopsis thaliana
MAIPQRNKRKARSSPERLTQPPELPHNSDVPSSSSSSAADNFFSWSTKQFAFPPGYRFVPKDQELIFHYLKPFSQGNKCSLLNVPIHRVNIYESNPQHLSEKYEKGNDKDWFYISERTKTGKAGRSNKRVDNGGYWSATVAAQKINAGNGIVGYKTSLEYYVGKQSNSVKGDWLMQEYWFESSDDNNNEKVDHALCKIYLTPAAAKKKKAEEAENEKLKKEEDVEQLDLNQPDQLQLQQPHDIVYQPQYCLLPEHHQPQPFPDNFSELISFQQQPVMIPDDFEDFLAEFTKPHSLDGDEEFNNYGLFEGFFDTEGMIKH

SEQ ID NO: 848 - DNA, 1502 bp, Arabidopsis thaliana
tcgacttcctgtgaactcatctgtttgttctcttcttccggtttcactttttcatgtcctgccgttattacaacgaggattgtgtttgatccgatggaaggattggaatctgtgtacgctcaagctatgtatggaatgacacgagagagcaaaatcatggagcatcaaggatcagatttgatttggggaggaaatgagctaatggctcgagaactctgttcttcttcttcttatcaccaccaactcattaatccgaatcttagcagctgtttcatgtctgatcttggagtcttaggtgagattcaacagcagcaacatgttggcaacagagctagctcgatagatccatcatcactcgattgtttgttatctgcgacgtcgaatagcaacaacacctcgacggaggacgatgaaggaatatctgtgcttttctcagattgtcagactctttggagctttggtggagtctcatctgcagagtctgagaacagagagatcactactgagacgacaacaacgataaagcctaagcctttgaagagaaacagaggaggagatggaggaactactgagactacaacaacaacaacaaaacctaagtctttgaagagaaacagaggagacgagacaggaagtcactttagtcttgttcatcctcaagatgattcggagaaaggaggtttcaagcttatatacgatgagaatcaatcgaaatcaaagaaaccaagaacagagaaagaacgaggcggttcttcgaacattagtttccaacattcaacttgtttgtctgacaatgtcgagcccgatgctgaggcgattgcacaaatgaaggagatgatatacagagcggctgcatttagaccggtgaatttcgggttagagattgtggagaagcctaagaggaagaacgtcaagatatcgacggatcctcaaacggttgcagcgagacagagaagggagaggataagtgagaagattagggttttacaaacattggttccaggtgggacgaagatggatactgcatcaatgcttgatgaagctgctaattatctcaagttccttagagcacaagtaaaagctttagaaaacttgagacccaagcttgaccaaaccaatctctctttctcttctgctcctacatcgtttccattattccacccatcttttcttccattgcaaaatcctaatcaaatccatcatccagagtgttgacagattataaacttttgagtttcatcatcatcaacagaatcatggcgtcttgattgttttagcagttctcaagaaaggcaacttctgtgacaagggtggtgtcgggcagtgttgtttacactttccagtctttgttttgcatttctttttatataaagtttgtattttatatagaatctgtggaattcgagggttgaaatattgtgaaaaacagagccgcaagaggttaattacagtctctgcaatattttcaaccttttattactttattagagtaaagatagcgt

SEQ ID NO: 849 - protein, 373 aa, Arabidopsis thaliana
MEGLESVYAQAMYGMTRESKIMEHQGSDLIWGGNELMARELCSSSSYHHQLINPNLSSCFMSDLGVLGEIQQQQHVGNRASSIDPSSLDCLLSATSNSNNTSTEDDEGISVLFSDCQTLWSFGGVSSAESENREITTETTTTIKPKPLKRNRGGDGGTTETTTTTTKPKSLKRNRGDETGSHFSLVHPQDDSEKGGFKLIYDENQSKSKKPRTEKERGGSSNISFQHSTCLSDNVEPDAEAIAQMKEMIYRAAAFRPVNFGLEIVEKPKRKNVKISTDPQTVAARQRRERISEKIRVLQTLVPGGTKMDTASMLDEAANYLKFLRAQVKALENLRPKLDQTNLSFSSAPTSFPLFHPSFLPLQNPNQIHHPEC

SEQ ID NO: 850 - DNA, 1626 bp, Arabidopsis thaliana
attcaaactttctttcattttcttctcttttttcttgtgtgtctgaagaagattatagtacaagtgtcattctcaaaattttgtcttagggttttttaattttgttacttcaaaaacccctaaaaaggcatgaacaacaacattttcagtactactaccaccatcaatgacgactacatgttattcccttataatgaccattattcctcacaaccattgctcccttttagcccttcttcttccattaacgacatcttgattcactccacctctaacacatcaaacaatcatcttgaccatcatcatcaattccaacaaccttctcctttttctcacttcgaatttgccccggactgcgccctcctcacctctttccacccagaaaacaatggccatgatgataaccaaaccatcccaaacgacaatcatcatccatcacttcactttcccttgaacaacaccattgtagaacaacccactgagccctcggaaactataaaccttatagaagattcccagagaatctcaacttctcaagacccaaaaatgaaaaaagccaagaaacccagcagaacggacaggcacagcaagatcaaaacggccaaagggacacgagatcgtaggatgagactctcgctagatgtcgccaaagagttgtttggcttacaagacatgcttggatttgacaaagccagcaaaaccgttgaatggttgcttacacaagcaaaacctgagatcataaagatcgcgacaaccctttctcaccatggctgcttcagcagcggcgatgagtctcatatccgaccggtgttaggatccatggacacatcttctgatctatgtgaacttgcatccatgtggacggtcgacgatagaggcagcaatactaacacgaccgaaacaagaggaaacaaggtcgatgggagatcgatgagagggaagagaaagaggccagaaccgcgaacgcccattttaaagaagttgtccaaggaggagagagcgaaagctagagaaagagcaaagggtagaacaatggagaaaatgatgatgaagatgaaaggaagatcacaattagtgaaagttgtggaagaagacgctcatgatcatggtgagataataaagaataataatagaagccaagtgaatcggagttcttttgagatgacacactgcgaagacaagatcgaagaactttgcaagaacgatcgttttgcagtttgcaacgaatttatcatgaataagaaagatcacatttcaaatgaatcttatgacttagtcaactacaaaccgaactcatcattcccagtgattaaccaccatcgcagccaaggagcagctaattccattgagcagcatcagtttacggatcttcattactccttcggcgcgaaaccaagagacctcatgcacaactatcaaaacatgtattgaaactgatttcatttaacattaatatctcaaattaatgatatatagtttggtgagagagatatgttaatccatcttatgtttttttttcttaacatcgtaattaatcatgtttatatgaaggctttttcgtcattttagtgtcaaatattaaacctatgtgaagaaattaatgcaatttgtataatattttgtttt

SEQ ID NO: 851 - protein, 433 aa, Arabidopsis thaliana
MNNNIFSTTTTINDDYMLFPYNDHYSSQPLLPFSPSSSINDILIHSTSNTSNNHLDHHHQFQQPSPFSHFEFAPDCALLTSFHPENNGHDDNQTIPNDNHHPSLHFPLNNTIVEQPTEPSETINLIEDSQRISTSQDPKMKKAKKPSRTDRHSKIKTAKGTRDRRMRLSLDVAKELFGLQDMLGFDKASKTVEWLLTQAKPEIIKIATTLSHHGCFSSGDESHIRPVLGSMDTSSDLCELASMWTVDDRGSNTNTTETRGNKVDGRSMRGKRKRPEPRTPILKKLSKEERAKARERAKGRTMEKMMMKMKGRSQLVKVVEEDAHDHGEIIKNNNRSQVNRSSFEMTHCEDKIEELCKNDRFAVCNEFIMNKKDHISNESYDLVNYKPNSSFPVINHHRSQGAANSIEQHQFTDLHYSFGAKPRDLMHNYQNMY

SEQ ID NO: 852 - DNA, 1866 bp, Arabidopsis thaliana
atggcttctgctcaatctttctacaaccaaagctctgtcttgaaaatcaatgtcatggttgtggacgatgatcatgttttccttgatatcatgtcacgcatgcttcaacactccaaatacagagatccatcagttatggagatcgcagttatagctgtagacgatccgaagaaagcattatctactctaaaaattcaacgagacaatatagatctcataatcacagattattatatgcctggtatgaacggtttacaactcaaaaaacaaatcactcaggaatttggaaatttaccggtcttagttatgtcatcggacaccaacaaagaagaggagagtttaagttgtggagcgatgggtttcattccaaaacccatacatcctactgacttaacaaagatttaccagtttgctttaagcaacaagaggaacggtaagtcaacactatcgaccgagcaaaaccacaaggacgcagatgttagtgtccctcagcaaatcacgttggttcctgagcaagctgacgtcttaaagaccaagaggaagaactgctcatttaaatcggattcaagaaccgtgaacagtacaaatggaagttgtgttagtacggatggttcaagaaaaaatcgaaaaagaaaacccaacggtggtcctagtgatgatggcgagtctatgtcgcaacccgcgaaaaagaaaaagattcagtggacggattctcttcacgacctattcttacaggctatccgacatattggtcttgataaggcggtgccaaaaaagatcctagcgttcatgagcgtaccatacttgacaagagagaacgtagccagccatttacagaaatatcggatattcttgagaagagttgcggagcagggtttgtatagcatgttgtcggatagaggcatagactcgatgtttcgacaaactcacattaaggagccgtacttcaactattacacaccatctacttcttggtatgacacaaggcttaacaatagatcattctattccaaacccgtacatggctttggacagtctaaactcttgtccacaacacgtgagcccgtctgcttcaaccagatgccttacaactacatgaaccggtcatccacctatgagccgcaccgtattggatctggatcaaacttgacgctgcccatccagagcaacctcagtttcccaaaccaaccatctcaaaacgaagaaagaagaagctttttcgaaccacccgtgatggcaaacaaaatcgcccaaacatctcaagttcttgggtttggacaacttggaccgtcagctatcagtggtcataatttcaacaataacatgacgagtagatatggaagtttgattccgagccaaccgggacctagccacttctcctatgggatgcaatcgttcttaaacaatgagaacgtaacatataaccctcagccacctgccaatgcaactacacagccaaatcttgatgaacttcctcaactggagaatctcaacttatacaatgatttcggcaacactagtgagcttccttacaacataagtaactttcaattcgatgacaacaagcatcaacaaggagaagcggatcccaccaaatttgagctcccagctgcaaaattttcgactgaactgaatcatgaagacgatggtgactggaccttcgtgaacataaaccagggtcaatctaatggagaaacatcgaacactattgcttctccggagactaatactccaattttgaacattaaccataatcagaatcagggacaagatgttccagagtttaacgattggtcgtttttggatccacaggaattggttgatgacgacttcatgaactctctgttcaacaatgacatgaattga

SEQ ID NO: 853 - protein, 621 aa, Arabidopsis thaliana
MASAQSFYNQSSVLKINVMVVDDDHVFLDIMSRMLQHSKYRDPSVMEIAVIAVDDPKKALSTLKIQRDNIDLIITDYYMPGMNGLQLKKQITQEFGNLPVLVMSSDTNKEEESLSCGAMGFIPKPIHPTDLTKIYQFALSNKRNGKSTLSTEQNHKDADVSVPQQITLVPEQADVLKTKRKNCSFKSDSRTVNSTNGSCVSTDGSRKNRKRKPNGGPSDDGESMSQPAKKKKIQWTDSLHDLFLQAIRHIGLDKAVPKKILAFMSVPYLTRENVASHLQKYRIFLRRVAEQGLYSMLSDRGIDSMFRQTHIKEPYFNYYTPSTSWYDTRLNNRSFYSKPVHGFGQSKLLSTTREPVCFNQMPYNYMNRSSTYEPHRIGSGSNLTLPIQSNLSFPNQPSQNEERRSFFEPPVMANKIAQTSQVLGFGQLGPSAISGHNFNNNMTSRYGSLIPSQPGPSHFSYGMQSFLNNENVTYNPQPPANATTQPNLDELPQLENLNLYNDFGNTSELPYNISNFQFDDNKHQQGEADPTKFELPAAKFSTELNHEDDGDWTFVNINQGQSNGETSNTIASPETNTPILNINHNQNQGQDVPEFNDWSFLDPQELVDDDFMNSLFNNDMN

SEQ ID NO: 854 - DNA, 1193 bp, Arabidopsis thaliana
attaaatagatctttaaacaaaaaaaccaaattctacttttctttcaaaaacaatctctcattatctcaatcttactcttgttcaatctcttttgaacttgaaaaaccatcattctatcaaatcaaacacaattgttagggtttctttttatcttatactccacgaaacgtctggttgagaaaaaatggaagaaagcaatgatatttttcagaacaatttcagtcctaaaatctcagaaatcagagcatctctgtctcagatcatattagcaggaggaccaaacacactcgactcaatcttctcacttctcactccctcctccgtagaatccgccacaacatcattcaacactcacaatcctccgccaccgccgcagctcgggtcctccgtctatctccgccaacgagatatcatcgagaagttccaccttcagaacagagcaatctccactcctcatcctcctctgttttcctcaacgtacgatcatcatcaaacttccgagctaatgctccaagcggcggccgggtctccagccgccgctttcgccgctgcgttagcggctgggagggtgacgaaaaagaagaaactttacagaggagtgaggcagagacattggggaaaatgggttgcggagataagattgccgcaaaacagaatgagggtttggttaggtacttacgacacggcggaagccgccgcttacgcttacgatcgcgccgcctataagctccgtggagaatacgctcgtctcaattttcctaatctcaaagacccgagtgagctactcggactcggagattcctctaagctaatagctctcaagaacgccgtcgacgggaagatccaatccatttgccagagagtcagaaaagagagagcaaaaaagagcgtaaaagtgagcaaaaactcgtcggccacggcggattcttcgtgtttgtcatcgccggagattctgtcgtcgtctccggtgacgacaactactactgcggttacttcagaggatagttattgggtttcacctatgggtttgtgtaacagtgaaaatagttctccggtatcagtttcggtccctagtgaagtaccggcgacggcggaggaagaggcaatgatgggagtggacactgatgggtttttattagcgaggatgccatcgttcgatccagagctgatttgggaagttcttgccaattaa

SEQ ID NO: 855 - protein, 335 aa, Arabidopsis thaliana
MEESNDIFQNNFSPKISEIRASLSQIILAGGPNTLDSIFSLLTPSSVESATTSFNTHNPPPPPQLGSSVYLRQRDIIEKFHLQNRAISTPHPPLFSSTYDHHQTSELMLQAAAGSPAAAFAAALAAGRVTKKKKLYRGVRQRHWGKWVAEIRLPQNRMRVWLGTYDTAEAAAYAYDRAAYKLRGEYARLNFPNLKDPSELLGLGDSSKLIALKNAVDGKIQSICQRVRKERAKKSVKVSKNSSATADSSCLSSPEILSSSPVTTTTTAVTSEDSYWVSPMGLCNSENSSPVSVSVPSEVPATAEEEAMMGVDTDGFLLARMPSFDPELIWEVLAN

SEQ ID NO: 856 - DNA, 2137 bp, Arabidopsis thaliana
cttcagcttctttttagccttcattcaaatctcagacacaccagtgtgtatacatgcatttgctctcttgatctccttgaaacttttgttttattccaaaacacatgcaaagtagataaagagatcttcttcttctgataataacctcgtgattatcgttttctcaagtcttcttcttcttcttcgttaccacacaaatgcagaagtactaatatagtgtaacgcttaatcaggctcagcaaagggtttaccaaagaagaagaacaaacaacaaacaagagagagaaaaagtaaaattgtttttataagaaagtttatgatggctccgatgacgaactggttaacgttttctctgtcaccaatggagatgttgaggtcatctgatcagtctcagtttgtctcctatgacgcttcttccgccgcttcctcctctccttatctcctcgataatttctatggttggtcaaaccaaaaacctcaggagtttttcaaagaagaagctcagttagcagcagcagcttcaatggcggattcaacaatcttaacaacattcgtagacccacaatctcatcattctcagaatcacatcccaaagctcgaagattttctcggtgactcttcttctatcgttcgttactccgacaacagtcaaaccgacacacaagactcttccctcactcaaatctacgatccacgtcaccaccataaccaaaccggcttttactccgatcaccacgatttcaaaaccatggccggttttcaatccgctttctctactaactccggttcagaggtcgatgactctgcttctatcggaaggactcatcttgctggagactatttgggacacgtggttgaatcttctggtccggagctagggtttcacggtggatctaccggagctttgtcacttggtgttaacgtcaataacaatactaatcaccggaatgataatgataatcattaccgaggcaataacaatggtgagagaatcaacaacaacaacaacaatgacaacgagaagacagattctgagaaggagaaggctgttgtggctgtggaaacatcagattgttctaataagaagattgctgatacgtttggtcaaaggacttcgatttacagaggtgttactcgacatagatggacgggaagatatgaagcacatctatgggataatagctgtaggagagaaggtcaggccaggaagggacgtcaagtatacttgggtggatatgacaaagaagataaggcagctcgagcttacgatttagcagctctgaaatactggaatgctactgctaccaccaatttccctattacgaattactcgaaagaagtggaggaaatgaagcacatgaccaagcaagagttcattgcctccctcaggaggaagagtagcggtttctctagaggagcttcgatataccgaggtgttacaaggcatcatcaacaaggacgttggcaagcaaggattggccgagttgctgggaacaaagatctttaccttggaacctttgcaacggaagaggaagcagctgaagcgtatgacatagcagcaatcaaattcagaggaataaacgctgtaactaactttgagatgaaccgttacgacgttgaagccatcatgaagagtgcacttcccatcggtggtgcagctaaacgtcttaagctctctttggaagctgctgcttcatcagagcagaaaccaatcctcggtcatcatcaacttcaccatttccagcaacaacaacaacaacaacagcttcagcttcagtcatctcctaatcacagtagcattaacttcgctctctgtcctaattcagcagttcagtctcaacagatcattccttgtggaatcccttttgaagcagctgctctttaccaccaccaccaacaacaacagcaacaccaacagcagcagcagcaacagaacttcttccagcattttccggcgaatgcagcttctgactcgaccgggtctaacaacaactccaacgttcagggaacaatgggacttatggcaccaaatccggctgagttcttcctctggcctaatcagtcttactaaaaccaatcatataagttgattgagtcaagtttttatcgttataagagacacaacttcttgattctg

SEQ ID NO: 857 - protein, 584 aa, Arabidopsis thaliana
MMAPMTNWLTFSLSPMEMLRSSDQSQFVSYDASSAASSSPYLLDNFYGWSNQKPQEFFKEEAQLAAAASMADSTILTTFVDPQSHHSQNHIPKLEDFLGDSSSIVRYSDNSQTDTQDSSLTQIYDPRHHHNQTGFYSDHHDFKTMAGFQSAFSTNSGSEVDDSASIGRTHLAGDYLGHVVESSGPELGFHGGSTGALSLGVNVNNNTNHRNDNDNHYRGNNNGERINNNNNNDNEKTDSEKEKAVVAVETSDCSNKKIADTFGQRTSIYRGVTRHRWTGRYEAHLWDNSCRREGQARKGRQVYLGGYDKEDKAARAYDLAALKYWNATATTNFPITNYSKEVEEMKHMTKQEFIASLRRKSSGFSRGASIYRGVTRHHQQGRWQARIGRVAGNKDLYLGTFATEEEAAEAYDIAAIKFRGINAVTNFEMNRYDVEAIMKSALPIGGAAKRLKLSLEAAASSEQKPILGHHQLHHFQQQQQQQQLQLQSSPNHSSINFALCPNSAVQSQQIIPCGIPFEAAALYHHHQQQQQHQQQQQQQNFFQHFPANAASDSTGSNNNSNVQGTMGLMAPNPAEFFLWPNQSY

SEQ ID NO: 858 - DNA, 1012 bp, Arabidopsis thaliana
ccagatttaatttgagactctcaaagaaacaccatggaagaagagcaacctccggccaagaaacgaaacatggggagatctagaaaaggttgcatgaaaggtaaaggcggtccagagaacgccacgtgtactttccgtggagttaggcaacggacttggggtaaatgggtggctgagatccgtgagcctaaccgtgggactcgtctctggctcggcacgtttaatacctcggtcgaggccgccatggcttacgatgaagccgctaagaaactctatggacacgaggctaaactcaacttggtgcacccacaacaacaacaacaagtagtagtgaacagaaacttgtctttttctggccacgggtcgggttcttgggcttataataagaagctcgatatggttcatgggttggaccttggtctcggccaggcaagttgttcacgaggttcttgctcagagagatcgagttttctacaagaagatgatgatcatagtcataatcgatgttcgtcttcaagtggttcgaatctttgttggttattacctaaacaaagtgattcacaagatcaagagaccgttaatgctacgactagttatggcggtgaaggcggtggtggctctacgttaacgttttcgaccaatttgaaaccaaagaatttgatgagtcagaattatggattatacaatggagcttggtctaggtttcttgtggggcaagaaaagaagacggaacatgacgtgtcatcgtcgtgtggatcgtcggacaacaaggagagtatgttggttcctagttgcggcggagagaggatgcataggccggagttggaagagcgaacaggatatttggaaatggatgatcttttggagattgatgatttaggtttgttgattggcaaaaatggagatttcaagaattggtgttgtgaagagtttcaacatccatggaattggttctgagagtttttatttattactattatttatcatacatatttcttatatttgacttagg

SEQ ID NO: 859 - protein, 307 aa, Arabidopsis thaliana
MEEEQPPAKKRNMGRSRKGCMKGKGGPENATCTFRGVRQRTWGKWVAEIREPNRGTRLWLGTFNTSVEAAMAYDEAAKKLYGHEAKLNLVHPQQQQQVVVNRNLSFSGHGSGSWAYNKKLDMVHGLDLGLGQASCSRGSCSERSSFLQEDDDHSHNRCSSSSGSNLCWLLPKQSDSQDQETVNATTSYGGEGGGGSTLTFSTNLKPKNLMSQNYGLYNGAWSRFLVGQEKKTEHDVSSSCGSSDNKESMLVPSCGGERMHRPELEERTGYLEMDDLLEIDDLGLLIGKNGDFKNWCCEEFQHPWNWF

SEQ ID NO: 860 - DNA, 1647 bp, Arabidopsis thaliana
atggaggttcttttgaaattaccctcttcagagtctcctcttaaggataaatttggatctgttcaaatccatgaagctaataagggtgatggtgatcatcaagaacttgaatctgccaaggcagagatgagcgaggtgaaggaagagaacgagaagcttaaaggaatgctcgaacgaattgaaagtgattacaaatctctcaagctcagattcttcgacataattcaacaagaaccttcaaacaccgcaactaaaaatcaaaacatggttgatcatcccaagccaacgacgacggatttgagttcttttgaccaagaacgcgagcttgtatcgctttcactagggagaagaagttcttccccaagtgatagcgtccccaaaaaggaagagaaaacggacgcaatcagcgcagaagtcaacgctgacgaagagttgactaaggccggcttgaccttagggatcaataatggcaacggaggtgaaccgaaagagggtttatctatggagaatcgtgcaaattctggctcggaagaagcttgggcgccaggtaaagttacggggaagagaagctctccagcaccagcctccggtggcgatgctgacggtgaggccggtcaacaaaaccatgttaagagagctagagtttgtgttagagcaagatgtgacacaccaacgatgaatgatggttgtcaatggagaaaatatggacaaaagattgcgaaaggaaatccatgtccacgagcatattatcgctgcacggttgcacctggatgtcccgttagaaaacaggtccaaagatgtgcagatgacatgtctatactaatcacaacctatgaaggaacacacagccactctcttccactctcagccaccaccatggcttccaccacatcagccgctgcctccatgctcctctctggctcctcctcctcaccagccgctgaaatgatcggaaataacctctacgacaattcaagattcaacaacaacaacaaatccttctattcacccacccttcactccccattacatcccaccgtcactctagacctcactgctccacaacactcttcctcgtcttcttcttcattgctttctttaaatttcaacaaattctcgaactctttccaaagattcccatctacaagcctaaatttctcttctacttcatcaacatcatcaaacccgtctactctcaacctacccgcgatttggggtaatgggtattcttcttatactccatatccttacaacaacgtccaatttgggacgtccaacctaggaaaaacagtccaaaatagccagtccttaaccgaaaccctaacaaaagcgcttacttccgacccaagtttccactcggtgatcgctgctgccatctcaactatggtcggatcaaatggagaacaacagattgtcggtccacggcattcgattagcaataacattcaacaaaccaacacgacgaataataacaaaggatgtggaggctattttagcagcttattgatgtctaacattatggcgagtaatcaaacgggtgcttctttggatcaaccatcgtcgcaacttcctcccttctctatgttcaagaattcttcttcttcgtcttctacgactaatttcgtgaacaaggaagagaaaagctag

SEQ ID NO: 861 - protein, 548 aa, Arabidopsis thaliana [sequence omitted]

SEQ ID NO: 862 - DNA, 849 bp, Arabidopsis thaliana
atggatgatcatgttgagcacaattataacacatctttagaagaagtacacttcaagagcttaagtgattgcttacaaagctcattagtaatggattataactcactagagaaggtcttcaaattctcaccttatagttccccttttcaatcggtttcaccgtcagtaaacaacccttacttaaatctcacttcgaattctccggtggtctcatcttcctccaatgaaggcgagcctaaagagaacaccaacgataagagtgaccaaatggaggataacgaaggcgacctacatggtgttggtgaaagctccaagcaactgacaaaacaaggtaaaaagaaaggagagaagaaagagagagaagttagggttgcatttatgaccaaaagcgagattgatcatcttgaagatggttatagatggcgaaaatatggacaaaaagcagtgaagaacagcccttatccaaggagttactataggtgcacaacacagaagtgtaacgtgaagaaacgtgtagagagatcgtttcaagatccgtcgatcgtaattacaacctacgaaggaaaacacaaccatccgatcccatcgacgttgagaggaaccgtggcagctgaacatctactagtccaccgtggtggtggaggcagtttactccatagcttccctcgtcaccatcaagattttctcatgatgaaacattctccggccaattatcaatcggtgggatctctgtcgtacgaacatggccatgggacctctagttacaattttaataataatcaaccagttgttgactatggtcttcttcaggacattgttccttcaatgttctccaagaacgagtcttga

SEQ ID NO: 863 - protein, 282 aa, Arabidopsis thaliana
MDDHVEHNYNTSLEEVHFKSLSDCLQSSLVMDYNSLEKVFKFSPYSSPFQSVSPSVNNPYLNLTSNSPVVSSSSNEGEPKENTNDKSDQMEDNEGDLHGVGESSKQLTKQGKKKGEKKEREVRVAFMTKSEIDHLEDGYRWRKYGQKAVKNSPYPRSYYRCTTQKCNVKKRVERSFQDPSIVITTYEGKHNHPIPSTLRGTVAAEHLLVHRGGGGSLLHSFPRHHQDFLMMKHSPANYQSVGSLSYEHGHGTSSYNFNNNQPVVDYGLLQDIVPSMFSKNES

SEQ ID NO: 864 - DNA, 719 bp, Arabidopsis thaliana
caatcgcgtctttgtttggtttaatcgtgatggaagggtcgtcttcttcgatgcagtcaaagtacaaaggagtgaggaagaggaaatggggaaaatgggtttcagagatcagacttcccaacagcagagaacgtatttggttgggctcttacgatactcctgagaaggcggcgcgtgctttcgacgcggctctttattgtctccgtggcaacaacgcaaagttcaatttccctgataatcctccggtgatctccggcggacgtaacttgtcgcgatctgagataagagaagctgctgcgaggttcgctaattcggcggaggatgattcaagtggcggagcaggatacgagatacggcaagaatctgcttcaacatcgatggacgttgattcggagtttttgagtatgcttccgacggttggttcgggtaacttcgcttcggagtttgggttattccctgggtttgatgatttctccgatgaatactccggtgatcgtttcagagagcagctttcgcctacacaagattattatcagcttggagaagagacttacgccgatggttccatgtttctttggaatttttgaattccattattcacaatctgaaaattttgacttgggttttttatttttttttgtagttctttacccaatttttttttgatcattgggataaagagttattcattcactatttttttcccacgtgttagattt

SEQ ID NO: 865 - protein, 185 aa, Arabidopsis thaliana
MEGSSSSMQSKYKGVRKRKWGKWVSEIRLPNSRERIWLGSYDTPEKAARAFDAALYCLRGNNAKFNFPDNPPVISGGRNLSRSEIREAAARFANSAEDDSSGGAGYEIRQESASTSMDVDSEFLSMLPTVGSGNFASEFGLFPGFDDFSDEYSGDRFREQLSPTQDYYQLGEETYADGSMFLWNF

SEQ ID NO: 866 - DNA, 1746 bp, Arabidopsis thaliana
atgaactcgatgaataactggttaggcttctctctctctcctcatgatcaaaatcatcaccgtacggatgttgactcctccaccaccagaaccgccgtagatgttgccggagggtactgttttgatctggccgctccctccgatgaatcttctgccgttcaaacatcttttctttctcctttcggtgtcaccctcgaagctttcaccagagacaataatagtcactcccgagattgggacatcaatggtggtgcatgcaataacattaacaataacgaacaaaatggaccaaagcttgagaatttcctcggccgcaccaccacgatttacaataccaacgagaccgttgtagatggaaatggcgattgtggaggaggagacggtggtggtggcggctcactaggcctttcgatgataaaaacatggctgagtaatcattcggttgctaatgctaatcatcaagacaatggtaacggtgcacgaggcttgtccctctctatgaattcatctactagtgatagcaacaactacaacaacaatgatgatgtcgtccaagagaagactattgttgatgtcgtagaaactacaccgaagaaaactattgagagttttggacaaaggacgtctatataccgcggtgttacaaggcatcggtggacaggtagatacgaggcacatttatgggacaatagttgcaaaagagaaggccagactcgcaaaggaagacaaggaggttatgacaaagaagaaaaagcagctagggcttacgatttagccgcactaaagtattggggaaccaccactactactaacttccccttgagtgaatatgagaaagaggtagaagagatgaagcacatgacgaggcaagagtatgttgcctctctgcgcaggaaaagtagtggtttctctcgtggtgcatcgatttatcgaggagtaacaaggcatcaccaacatggaaggtggcaagctaggatcggaagagtcgccggtaacaaagacctctacttgggaactttcggcacacaggaagaggctgctgaggcttatgacattgcagccattaaattcagaggattaagcgcagtgactaacttcgacatgaacagatacaatgttaaagcaatcctcgagagcccgagtctacctattggtagttctgcgaaacgtctcaaggacgttaataatccggttccagctatgatgattagtaataacgtttcagagagtgcaaataatgttagcggttggcaaaacactgcgtttcagcatcatcagggaatggatttgagcttattgcagcaacagcaggagaggtacgttggttattacaatggaggaaacttgtctaccgagagtactagggtttgtttcaaacaagaggaggaacaacaacacttcttgagaaactcgccgagtcacatgactaatgttgatcatcatagctcgacctctgatgattctgttaccgtttgtggaaatgttgttagttatggtggttatcaaggattcgcaatccctgttggaacatcggttaattacgatccctttactgctgctgagattgcttacaacgcaagaaatcattattactatgctcagcatcagcaacaacagcagattcagcagtcgccgggaggagattttccggtggcgatttcgaataaccatagctctaacatgtactttcacggggaaggtggtggagaaggggctccaacgttttcagtttggaacgacacttag

SEQ ID NO: 867 - protein, 581 aa, Arabidopsis thaliana
MNSMNNWLGFSLSPHDQNHHRTDVDSSTTRTAVDVAGGYCFDLAAPSDESSAVQTSFLSPFGVTLEAFTRDNNSHSRDWDINGGACNNINNNEQNGPKLENFLGRTTTIYNTNETVVDGNGDCGGGDGGGGGSLGLSMIKTWLSNHSVANANHQDNGNGARGLSLSMNSSTSDSNNYNNNDDVVQEKTIVDVVETTPKKTIESFGQRTSIYRGVTRHRWTGRYEAHLWDNSCKREGQTRKGRQGGYDKEEKAARAYDLAALKYWGTTTTTNFPLSEYEKEVEEMKHMTRQEYVASLRRKSSGFSRGASIYRGVTRHHQHGRWQARIGRVAGNKDLYLGTFGTQEEAAEAYDIAAIKFRGLSAVTNFDMNRYNVKAILESPSLPIGSSAKRLKDVNNPVPAMMISNNVSESANNVSGWQNTAFQHHQGMDLSLLQQQQERYVGYYNGGNLSTESTRVCFKQEEEQQHFLRNSPSHMTNVDHHSSTSDDSVTVCGNVVSYGGYQGFAIPVGTSVNYDPFTAAEIAYNARNHYYYAQHQQQQQIQQSPGGDFPVAISNNHSSNMYFHGEGGGEGAPTFSVWNDT

SEQ ID NO: 868 - DNA, 750 bp, Arabidopsis thaliana
atgttctccaacatcgatcaaacagctgtggcagcactcctccgtggccaaggatgcgctaacagtctcaagaggctcctcgaaaaccacaagttaagctcagattcaacagagccgctcatctacaccatactcaattctttctcacttgctctctcttttgtggacccgcctagtcttctaccacacaatgagtcttctcttcaaaacatgacaagtcatgttcttcagagatcatcaaagaaaaaatattatggagcagaagatttagagtattacagagacgaatccccgactccacgccccgatgacggcttcacctggaggaaatatggacaaaaaactatcaaaacctcaccgtaccaaaggtgttactatcggtgtacctatgcaaaagaccaaaactgcaatgctagaaagcgggtgcagatgatccaagataaccctccagtgtacagaactacttatttgggaaaacatgtgtgtaaagctgttgcagttcatgatgatacatatggttctgaaatgataaaattcgaccaagttgtatctgaatcggttatgcctcaactcgcaacaattgacgaacaagcaattaccatggaggacgaagccatagaccatatcatgaaccaagaatgtgatattaatgatttttctgtggatgatgacccattttgggctagtcaatttcctccattttcatcggaagacattatgttttttgacaatattgctaatcttgattag

SEQ ID NO: 869 - protein, 249 aa, Arabidopsis thaliana
MFSNIDQTAVAALLRGQGCANSLKRLLENHKLSSDSTEPLIYTILNSFSLALSFVDPPSLLPHNESSLQNMTSHVLQRSSKKKYYGAEDLEYYRDESPTPRPDDGFTWRKYGQKTIKTSPYQRCYYRCTYAKDQNCNARKRVQMIQDNPPVYRTTYLGKHVCKAVAVHDDTYGSEMIKFDQVVSESVMPQLATIDEQAITMEDEAIDHIMNQECDINDFSVDDDPFWASQFPPFSSEDIMFFDNIANLD

SEQ ID NO: 870 - DNA, 765 bp, Arabidopsis thaliana
atggtttccaacattgatcacaaggctatggaagcactcctccgtggccaaggatgcgctaacaacctcaagattctccttgaaaacggcgaaataagctcagtttcaacagaaccactcatccacaccattctcgattctttctcacttgctctgtcttttatggattctcctaatcatccaccataccatgaatcctcttctcataacatggcaagtcatatgtcccggagatcatctaagcaagtacaacatcgcagaaaactttgtgtagcagaaggtttagtgaattacaatcacgattcccggactatgtgccccaatgatggcttcacctggaggaaatatggacaaaaaaccattaaagcctcagcgcacaaaaggtgttactatcggtgtacctatgcaaaagaccaaaactgcaatgctacaaagcgggtgcagaagatcaaagacaaccctccagtgtacagaaccacttacttgggaaaacatgtgtgtaaagcttttgcagttcatgatgatacatatagttccacgatgattcgattcgaccaagttgttcctgaaccgattatgccgcagctcacaacaattgaccaccaagtaattaccgtggaggaaaactccgcagaacatatcatgaaccaagaatgtgatattaatgattatttggtggatgatgacccattttgggctagtcaatttcccccgtttccatcgagtgacacaatgttcttggaaaacatttctgcttttgattag

SEQ ID NO: 871 - protein, 254 aa, Arabidopsis thaliana
MVSNIDHKAMEALLRGQGCANNLKILLENGEISSVSTEPLIHTILDSFSLALSFMDSPNHPPYHESSSHNMASHMSRRSSKQVQHRRKLCVAEGLVNYNHDSRTMCPNDGFTWRKYGQKTIKASAHKRCYYRCTYAKDQNCNATKRVQKIKDNPPVYRTTYLGKHVCKAFAVHDDTYSSTMIRFDQVVPEPIMPQLTTIDHQVITVEENSAEHIMNQECDINDYLVDDDPFWASQFPPFPSSDTMFLENISAFD

SEQ ID NO: 872 - DNA, 648 bp, Arabidopsis thaliana
atggaactaaacctctctacacccacatcatgttcctccagcagcatctcatcatcttcgcatgaggccatccctaggaccaagggtaaaacgaaagaggaggtcacggctgagccgtcgaaggagaatcagcagcggctagagttccgcttcctgttcaacgagagtagtacaagaaacgaggctaaagcgagggtgtttgcttgcaccttctgcaaaaaagagttctctacgtctcaagccttaggaggacatcagaacgctcacaagcaagagcgatcattggctaaaaggcgtaaagagatcgaaatcaactatcctgaactctccatctacagccagtacccgccaagtggactttccttcagcagcagctcctcgcagtatgatctcggggttcgttacaatcctaacattgctaaaactactaagccctatccgttcaacatcttcgcatgtcgatttggatacagagggggactaaatttccctcccatgtctcacctctcggttccaaagacagacgatttgtccataaacttgatttcaaatctagagggcagcattcacgaccaagccgtaaaaaaagatcaacctgaagctgatccttgcaaggattctgatatagacttgtcccttaagctatag

SEQ ID NO: 873 - protein, 215 aa, Arabidopsis thaliana
MELNLSTPTSCSSSSISSSSHEAIPRTKGKTKEEVTAEPSKENQQRLEFRFLFNESSTRNEAKARVFACTFCKKEFSTSQALGGHQNAHKQERSLAKRRKEIEINYPELSIYSQYPPSGLSFSSSSSQYDLGVRYNPNIAKTTKPYPFNIFACRFGYRGGLNFPPMSHLSVPKTDDLSINLISNLEGSIHDQAVKKDQPEADPCKDSDIDLSLKL

SEQ ID NO: 874 - DNA, 879 bp, Arabidopsis thaliana
atgacaagtgttcttgaggagagtggagaccacgcgcgtcttgttctcctcatcaagggcaaacgcaccaaacgtcagcgttctgcgtctcctcttatgatgaacgctgctgcagtatccagcgtttgtagcggtgaacgatcatcagtggaggtaagagaagaagaagctgctggtgaagtagaattccaaggagctaccgatgaagacgaagatatggcgaattgtctgatcttgttgtcgcaaggacatcaagcaaagagcagcgacgatcatttgtcgatgcagagaatgggtttctttagcaacaagaaaccggtggcttctctagggttagggctagacggtgtttaccagtgcaaaacgtgtgataaaagcttccattcgttccaagcgctaggagggcacagggctagtcacaagaagccaaaacttggagctagcgttttcaaatgcgtcgagaagaaaacggcgtctgcgtctacggttgaaacagtggaagctggagccgtaggaagctttctttccctacaagtgactagtagtgatggtagcaagaaaccggagaaaacacatgaatgttcaatctgcaaggccgagttttcttcaggacaagccttaggaggacatatgaggagacatagaggtttaacaataaacgcaaacgctacttcagcaatcaaaacagcgatatcatcatcaagtcatcatcaccatgaagaatctatacggccaaagaactttctccagttagatctgaatcttccagcacccgaagatgaacgatgctgcgagaaaccgaaattcgcgtttgcatccaaagatcagattcttctcttcacggccgcgtcaaattctttgattgattgtcatcactaa

SEQ ID NO: 875 - protein, 292 aa, Arabidopsis thaliana
MTSVLEESGDHARLVLLIKGKRTKRQRSASPLMMNAAAVSSVCSGERSSVEVREEEAAGEVEFQGATDEDEDMANCLILLSQGHQAKSSDDHLSMQRMGFFSNKKPVASLGLGLDGVYQCKTCDKSFHSFQALGGHRASHKKPKLGASVFKCVEKKTASASTVETVEAGAVGSFLSLQVTSSDGSKKPEKTHECSICKAEFSSGQALGGHMRRHRGLTINANATSAIKTAISSSSHHHHEESIRPKNFLQLDLNLPAPEDERCCEKPKFAFASKDQILLFTAASNSLIDCHH

SEQ ID NO: 876 - DNA, 795 bp, Arabidopsis thaliana
tcacttccacattgtcttcttcatatggtaaaaaggagagaggagaaggcaaagtggtgaaagaggagatggagcaagagagcctaaacggtaggtatggtagtagagtaatgacggatgaacaaatggagactcttcgtaagcaaatcgccatttacgccgttctttgcgaccagctcgtcttcctccacaactctctctcttctgtccctcttctttcatcaggaatgaatccaatgagaggtgagtattttgatccaatggtggcatcgtcaagcgctcatggaatgtcgactcggcctcgatggactcctacgacaacgcaacttcagattcttgagaacatttacaaggaaggcagtggaacaccaaatccgcggaggattaaagagatcacgatggaactgtctgaacatggacaaatcatggagaaaaatgtataccattggtttcaaaaccgacgagctcggtccaaacgaaagcaacctccgacaacgacaattacctcgagtcaggcggatgatgcggccgtgacaacaactgaggagagagggaggtgtggagatgattctggagggtttgagtcttatgagcatatactgttcccgagtcctgatttagggattgagcatttgttgaatagggacaagtttatagactgagtgaaacaaagatgatgaactctccaacctctctgtttttatttggttttctcaataaattgatatcatcgtatatgattgtgtgagggagaccttgaacaagtttttttttactgtagaatttgtttttccg

SEQ ID NO: 877 - protein, 197 aa, Arabidopsis thaliana
MEQESLNGRYGSRVMTDEQMETLRKQIAIYAVLCDQLVFLHNSLSSVPLLSSGMNPMRGEYFDPMVASSSAHGMSTRPRWTPTTTQLQILENIYKEGSGTPNPRRIKEITMELSEHGQIMEKNVYHWFQNRRARSKRKQPPTTTITSSQADDAAVTTTEERGRCGDDSGGFESYEHILFPSPDLGIEHLLNRDKFID

SEQ ID NO: 878 - DNA, 678 bp, Arabidopsis thaliana
atggatagaggagaatgcttgatgtcgatgaagcttagaccgatggtgacgaggccatcttcggatgggactttattttggccgtttagggaagagagagcgtttgcgtcagctgaggagtatggcggcggaggtggttgcatgtggccaccgaggtcttactcatgcagcttttgcgggagagagttcaagtcggcgcaagcactaggcggtcatatgaacgttcatcgaagagaccgagctcgactcaaacaacaatcattatcaccttcatcaactgaccaagccacacctcctgaatgtgatcgtcaacaacaagttcttgatgtgggatcaaaggttcttgttcaagaagaaacaagaaagcctaacggaaccaagagggagataagtgatgtttgtaataacaacgttttagaaagttctatgaaaagatatgaacatgacaatggtgaagtcaagactgacttatcggtcggtctactgagtactgagtttgatcctcggaagaagcaactaatcaacggatcatcttcgtcatggaagagggcaaagacggatgtgtcaagatttccaatgatgttagggttggtcattggaatttccgagatcaacggccatcatgaggagttggatcttgagctaaggctaggagctgatccgcctaaggttaactag

SEQ ID NO: 879 - protein, 225 aa, Arabidopsis thaliana
MDRGECLMSMKLRPMVTRPSSDGTLFWPFREERAFASAEEYGGGGGCMWPPRSYSCSFCGREFKSAQALGGHMNVHRRDRARLKQQSLSPSSTDQATPPECDRQQQVLDVGSKVLVQEETRKPNGTKREISDVCNNNVLESSMKRYEHDNGEVKTDLSVGLLSTEFDPRKKQLINGSSSSWKRAKTDVSRFPMMLGLVIGISEINGHHEELDLELRLGADPPKVN

SEQ ID NO: 880 - DNA, 696 bp, Arabidopsis thaliana
gtgtgatatcgaaatccaaaaatctccctcttcctttctctatttctttcttaaattccatcatctagaaatttcaaagcctcataatttcaatcttttagaagggactccatcgcgtaacaataatttcaactcaatgttccaacaaaacttacatgatgaagacgacgtccatgttcaagaccatgtctacaatcatgaccagtaccatcatcaacaaccgaatgttgtgacggatgaagagaagaggttaaggagaatggcgtctaatcgagaatcagcaagaagaacgcggatgcgtgagcggatgatgaaagaggggttgcaaatgcaagtaaaacaactcatggcgtacaatcaattcttgtataacaaatatattagcttgttggagtacaatcaccagatcttgcaagagaattcacagctcaaagagacagtttcatcctttcatgatcaatatactatatcttatggaaaccatgaaggtatacttggaaacaccaatgatttcgatttaaaccaactatcttcgtatcaaccatcttaactggtaagtcgaaaaatattatttttagtggaaaatggttctaatgtaattagcttcttttattatttatctctctactggattctatctatatagaataataattgtcaatacatttgcttcatgatttctcaatatatttctag

SEQ ID NO: 881 - protein, 137 aa, Arabidopsis thaliana
MFQQNLHDEDDVHVQDHVYNHDQYHHQQPNVVTDEEKRLRRMASNRESARRTRMRERMMKEGLQMQVKQLMAYNQFLYNKYISLLEYNHQILQENSQLKETVSSFHDQYTISYGNHEGILGNTNDFDLNQLSSYQPS

SEQ ID NO: 882 - DNA, 1041 bp, Arabidopsis thaliana
atggcagggttcttctatctaggagggagagacaacaacagcaacaacaacaagcaagatcatcatcaagtagacaaggatcatcatcatcaagacaagagcaattatctttatctttacaaagacgagatctataataacaacaagggtttcgagatttggcctccgcaatacttccaacaacaagaacatcaacaacaacaacaacagcaacaacatgcctcagctcctgcaaacttctactcatttggaatggttcctagcggaagcagcagcaacaacaacaataaccgtagccggagtttatacttcaacgtagtctccgatcatgagccgggagggttcacggtgacgagacaaggaggtatgaattgtcaagattgtggaaatcaagctaagaaagattgtcctcatatgagatgtagaacttgttgtaaaagccgaggctttcattgtcaaactcacgttaagagcacttgggttcctgctgctaaacgtcgtgagcgtttagcccaactcgcttccttgcagcaccactcagcctccagccgtgaaacgcaaaacgccaaacgccttcgagaagctagtggtggtgataataatgatgataaagaccatagtggtggtggtggatcggctcttgctaatacccgtgtggtgaatgctaattctaattcagggttggaggtgagtcaacacttaccaccggaggttaactcaccggcgatattccggtgcgttagagtgagctcaatagaagaggatgaagatgatcaagcatatgcttaccaaacggctgtgaacattggaggccatatcttcaaaggcattctctatgaccaaggaccagaacatcaagataatcatcaccttaacctacttgcttccactgcaaccaccaccaatgtggaggagaccgccactaagactgtcaccggtaacaataataatggattaatgcttgatccttcttcgctttacccagctcaactcaactccttcatcgcgggtacgccattcttcacacctccgaggtcttga

SEQ ID NO: 883 - protein, 346 aa, Arabidopsis thaliana
MAGFFYLGGRDNNSNNNKQDHHQVDKDHHHQDKSNYLYLYKDEIYNNNKGFEIWPPQYFQQQEHQQQQQQQQHASAPANFYSFGMVPSGSSSNNNNNRSRSLYFNVVSDHEPGGFTVTRQGGMNCQDCGNQAKKDCPHMRCRTCCKSRGFHCQTHVKSTWVPAAKRRERLAQLASLQHHSASSRETQNAKRLREASGGDNNDDKDHSGGGGSALANTRVVNANSNSGLEVSQHLPPEVNSPAIFRCVRVSSIEEDEDDQAYAYQTAVNIGGHIFKGILYDQGPEHQDNHHLNLLASTATTTNVEETATKTVTGNNNNGLMLDPSSLYPAQLNSFIAGTPFFTPPRS

SEQ ID NO: 884 - DNA, 1672 bp, Arabidopsis thaliana
tctttgaaacatgccggttgatttagataattcctctacagtttccggcgatgcaagcgtctcatcgaccggaaaccaaaatctaactcctaaatccgtcgggaagaagaaacggaatcttcctggaatgcctgatccagacgctgaagtgatagctttgtcacctaaaacacttatggcaacgaatcgattcgtttgcgaaatctgtaacaaaggttttcaacgtgaccagaatcttcagcttcatcgtcgtggtcacaatcttccatggaaacttcgacagagatcgactaaagaagtgaggaagaaggtttatgtttgtcctgtttctggctgtgttcatcatgacccttcacgtgctcttggagatcttactggaatcaagaaacacttttgtcggaaacacggcgagaagaaatggaagtgtgagaaatgttctaagaagtatgctgttcaatcagattggaaagctcattcgaagatttgtggcaccaaggagtataaatgcgattgtggaactctgttttctaggagagatagctttataacgcatagagccttttgtgatgccttggctgaagagagtgcgaagaatcatactcaaagcaagaaactttatccagaaactgtcactaggaagaatcctgaaattgagcaaaaatctccagcagctgttgagtcttctccgtcattaccgccttcttctccgccatcggttgctatagctccggcaccggctatttcggttgagactgagtctgtcaaaatcatatcttcctctgttttgccgattcagaattctccagaatctcaagaaaacaacaatcatcctgaagtcattattgaggaagcttcaagaacgatcgggttcaatgttagctcatcggatctaagcaatgatcacagtaacaacaatggtggatacgcaggtttgtttgtatcatcaacagcttcgcctagtttatatgcttcctcaaccgcttctccaagtctattcgcaccatcgtcctccatggaacccatctctctctgtctctcgacgaacccttctttgttcggaccaacaatacgagatccgccacatttcctaactcctctccctcctcaaccggcaatgtcagctactgcattgctccaaaaagctgcacaaatgggttccacgggatcaggaggttcgttgcttcgcgggttaggcatagtttcaactacttcttcatctatggaactcagcaatcatgatgcattgtcattagctcctggtcttggacttggactaccttgtagcagcggtggtagcggatcgggtctaaaagagctcatgatggggaattcatcggtgtttggtccgaaacagacgacactagactttcttggattaggaagagctgttggtaatggtggtaataccggaggtggattgtctgctctgttaacttctataggtggtggaggtggaatcgatctgtttggatcaggggagttttcaggcaaagacattggaagaagttcgtaagagagacaaaaggcatgaacgtagtagaccagtgtagtatatagttcatcaagtttgtttcaggttttagatgttttggtatcttgttttagtgaaagctttagttttattcccaagtgggttttctctcaagtacataaatctcctagcaacaacaac

SEQ ID NO: 885 - protein, 500 aa, Arabidopsis thaliana
MPVDLDNSSTVSGDASVSSTGNQNLTPKSVGKKKRNLPGMPDPDAEVIALSPKTLMATNRFVCEICNKGFQRDQNLQLHRRGHNLPWKLRQRSTKEVRKKVYVCPVSGCVHHDPSRALGDLTGIKKHFCRKHGEKKWKCEKCSKKYAVQSDWKAHSKICGTKEYKCDCGTLFSRRDSFITHRAFCDALAEESAKNHTQSKKLYPETVTRKNPEIEQKSPAAVESSPSLPPSSPPSVAIAPAPAISVETESVKIISSSVLPIQNSPESQENNNHPEVIIEEASRTIGFNVSSSDLSNDHSNNNGGYAGLFVSSTASPSLYASSTASPSLFAPSSSMEPISLCLSTNPSLFGPTIRDPPHFLTPLPPQPAMSATALLQKAAQMGSTGSGGSLLRGLGIVSTTSSSMELSNHDALSLAPGLGLGLPCSSGGSGSGLKELMMGNSSVFGPKQTTLDFLGLGRAVGNGGNTGGGLSALLTSIGGGGGIDLFGSGEFSGKDIGRSS

SEQ ID NO: 886 - DNA, 819 bp, Arabidopsis thaliana
atggattcttccagcggaaaaccaagatcatctgattcctcatgcatcatttctgcatccaccagtcttcaattttcagattccccaaagctgagcctagaaaattacaacatagacacagtagcagcacaagaagaagatgatcatgaccaaaaagaaggagtggaaggtataaagcttgaccttatgctagcaggatatgattctagtcaaccacagctcaatcaagaactcaatctcctcgactgcttagagacaggtgtagtcactccgagttttaacgggtcaacttccactgaacagaagctcttctcatgcaactactgtcaaagaacattctacagctcacaggcgcttggtggtcaccaaaacgcccacaaaagagaaaggactttggcaaagcgagggcaacggatggcatctgccgcagctttcgggcatccatatggttttgctccggtcccgttccatggacagtacagcaacagaaccttgggtattcaggcacactcaatgagtcataagccaagttcatataacgtttacggtggtgagtatggtcagatcaactggtcaaggataccactagttcagcaaccagcaatagcaaaactaacttcaacagagaatcattataatcatcatcagatgatgattgctccaccgttgacttccacatgtgaaaacatcggtaggttcgatgtaggaaggattccagtagagtttccaacttctgaactatggcagagaggcgaggaattgttgaagccagctgaagaagagaagcagaagaaccttgacttgtcccttaaactttga

SEQ ID NO: 887 - protein, 272 aa, Arabidopsis thaliana
MDSSSGKPRSSDSSCIISASTSLQFSDSPKLSLENYNIDTVAAQEEDDHDQKEGVEGIKLDLMLAGYDSSQPQLNQELNLLDCLETGVVTPSFNGSTSTEQKLFSCNYCQRTFYSSQALGGHQNAHKRERTLAKRGQRMASAAAFGHPYGFAPVPFHGQYSNRTLGIQAHSMSHKPSSYNVYGGEYGQINWSRIPLVQQPAIAKLTSTENHYNHHQMMIAPPLTSTCENIGRFDVGRIPVEFPTSELWQRGEELLKPAEEEKQKNLDLSLKL

SEQ ID NO: 888 - DNA, 579 bp, Arabidopsis thaliana
atgtcgcagctgttatcttctcctccaatggcggttttctccaaaaccttcataaaccataagttttcagatgctcgttttctctcttctcactcaattctcacctccggtggattcgccggaaaaattattcctttaaaaccgacggcgaggttgaaattaacggtgaagtctcgacaaagtgattactttgagaaacagaggtttggtgactcgtcttcttcgcaaaacgctgaagtatcttctcctagattttacgtgggtcattcgatttacaaagggaaagctgctcttacgatagaaccacgagcaccagagtttgtggctttggaaattgtgatgatgaaaatcaattggtttggtgaaagatattatgattgtggtgttcaaaacaagctcttgaatgtagatgagagtgtatacataccaatcactaaagcagagtttgctgttcttatctctgctttcaacgctggagtgcatttgctaactccatcaaaccagaagactctaaccgccttaacaatgcttcgcctaagtatggaggagactacgaatggagtagatgatggagattag

SEQ ID NO: 889 - protein, 192 aa, Arabidopsis thaliana
MSQLLSSPPMAVFSKTFINHKFSDARFLSSHSILTSGGFAGKIIPLKPTARLKLTVKSRQSDYFEKQRFGDSSSSQNAEVSSPRFYVGHSIYKGKAALTIEPRAPEFVALEIVMMKINWFGERYYDCGVQNKLLNVDESVYIPITKAEFAVLISAFNAGVHLLTPSNQKTLTALTMLRLSMEETTNGVDDGD

SEQ ID NO: 890 - DNA, 726 bp, Arabidopsis thaliana
atgttttcaaacatcgatcacaaggctgtggcagcactccttcatggccagggatgcgctaacatcctcaagacggtcctcgacaactgtaaagttagctctgtttcaacagaacctctcattaacaccattcttgattccttttcactagctctatcttctgtgaattctcctaatcgtcaaccacaccatgagtcttcttctcgagacatggcaggtcttgtgcctcaaagatcatcaaagaagaagatttgcggagtaaaaggtttagagatttacagagatgattcccccaatccccgccttgatgacggcttcacctggaggaaatatggacaaaaaaccatcaaaacctctttgtaccaaaggtgttactatcgttgtgcctatgcaaaagaccaaaactgctatgctacaaagcgggtgcagatgatccaagacagtcctccagtttacagaaccacttatttgggacaacatacatgtaaagcctttggggtgcatgataatacgtatggctctgaaatgataaacttcgaccaagttgtatctgaatcggttatgcgtcaacttgcaacaattggtgaacaagctgttctcatggaggacgaagctaaccatatcatgaaccaagaatatgatattaatgattatttggtggatgatgaagtcttttgggggaatgaatttcctctattttcatcggaagacctgatgttgttttga

SEQ ID NO: 891 - protein, 241 aa, Arabidopsis thaliana
MFSNIDHKAVAALLHGQGCANILKTVLDNCKVSSVSTEPLINTILDSFSLALSSVNSPNRQPHHESSSRDMAGLVPQRSSKKKICGVKGLEIYRDDSPNPRLDDGFTWRKYGQKTIKTSLYQRCYYRCAYAKDQNCYATKRVQMIQDSPPVYRTTYLGQHTCKAFGVHDNTYGSEMINFDQVVSESVMRQLATIGEQAVLMEDEANHIMNQEYDINDYLVDDEVFWGNEFPLFSSEDLMLF

SEQ ID NO: 892 - DNA, 1194 bp, Arabidopsis thaliana
ctctgtctctcgtatctttctactactctgtttcttgaattctaatgaacaacatcgacgacgcaaagacggagacttcagtgtcttcaggttcaagcgactctttcttgcctctcaagaaacgcatgagacttgatgacgaaccagaaaacgccctagtggtttcgtcttcaccaaagacggttgtggcttctggcaatgtcaagtacaaaggagtcgttcagcaacagaacggtcattggggtgcccagatttacgcagaccacaaaaggatttggcttggaactttcaaatccgctgatgaagccgccacggcttacgatagtgcatctatcaaactccgaagctttgacgctaactcgcaccggaacttcccttggtctacaatcactctcaacgaaccagactttcaaaattgctacacaacagagactgtgttgaacatgatcagagacggttcgtaccaacacaaattcagagattttctcagaatcagatctcagattgttgcgagtatcaacatcgggggaccaaaacaagcccgaggagaagtgaatcaagaatcagacaagtgtttttcttgcacacagctttttcagaaggaattgacaccgagcgatgtagggaaactaaataggcttgtgatacctaaaaagtatgcagtgaagtatatgcctttcataagcgctgatcaaagcgagaaagaagagggtgaaatagtaggatctgtggaagatgtggaggttgtgttttacgacagagcaatgagacaatggaagtttaggtattgttactggaaaagtagccagagctttgtcttcaccagaggatggaatagtttcgtgaaggagaagaatctcaaggagaaggatgttattgccttctacacttgcgatgtcccgaacaatgtgaagacattagaaggtcaaagaaagaacttcttgatgatcgatgttcattgcttttcagacaacggttccgtggtagctgaggaagtaagtatgacggttcatgacagttcagtgcaagtaaagaaaacagaaaacttggttagctccatgttagaagataaagaaaccaaatcagaggagaacaaaggagggtttatgctgtttggtgtaaggatcgaatgtccttagggaatttttctttaaaagtttcttacttcaactagaacttgttttacttgtacct

SEQ ID NO: 893 - protein, 364 aa, Arabidopsis thaliana
MNNIDDAKTETSVSSGSSDSFLPLKKRMRLDDEPENALVVSSSPKTVVASGNVKYKGVVQQQNGHWGAQIYADHKRIWLGTFKSADEAATAYDSASIKLRSFDANSHRNFPWSTITLNEPDFQNCYTTETVLNMIRDGSYQHKFRDFLRIRSQIVASINIGGPKQARGEVNQESDKCFSCTQLFQKELTPSDVGKLNRLVIPKKYAVKYMPFISADQSEKEEGEIVGSVEDVEVVFYDRAMRQWKFRYCYWKSSQSFVFTRGWNSFVKEKNLKEKDVIAFYTCDVPNNVKTLEGQRKNFLMIDVHCFSDNGSVVAEEVSMTVHDSSVQVKKTENLVSSMLEDKETKSEENKGGFMLFGVRIECP

SEQ ID NO: 894 - DNA, 1065 bp, Arabidopsis thaliana
atggatatggacgagatgagcaatgtagccaagacaacgacagagacttcaggcttaactgactctgtcttgagcctcacgaaacgcatgaaacctactgaggttacgaccaccacaaaacctgccttgtccaacacgacgaaattcaaaggagttgttcagcaacagaacggtcattggggtgctcagatttacgcagaccatcgaaggatttggcttggaactttcaaatccgctcatgaagccgctgctgcttacgatagcgcatcgattaagcttcgaagctttgatgctaactcgcaccggaacttcccttggtctgattttaccctccatgaaccggactttcaagagtgctacacgacagaagctgtgttgaacatgatcagagacggttcttatcaacacaagttcagagattttctcagaatccggtctcagattgttgcgaatatcaacatcgtgggatcaaaacaagtcttaggaggaggagaaggtggtcaagaatcgaacaagtgtttctcgtgcacgcagctttttcagaaagaactgacaccgagcgatgtagggaaactgaataggcttgtgatacctaagaagtatgcagtgaagtatatgcctttcataagcgatgatcaaagcgagaaagagacgagtgaaggagtagaagatgtggaggttgtcttttacgacagagcaatgagacaatggaagtttaggtattgttactggagaagtagccagagctttgtcttcaccagaggatggaatggtttcgtgaaggagaagaatctcaaggagaaagatattattgtcttttacacttgcgatgtccccaacaatgtgaagacattagaaggccaaagcaagaccttcttgatgattgatgttcatcacttttcaggcaacggtttcgtggttcccgaggaagtaaacaagacggttcatgagatttctgatgaagagatgaaaacagaaaccctctttacctcgaaggtagaagaagaaaccaaatcagaggagaagaaaggagggtttatgctgtttggtgttaggatccaatag

SEQ ID NO: 895 - protein, 354 aa, Arabidopsis thaliana
MDMDEMSNVAKTTTETSGLTDSVLSLTKRMKPTEVTTTTKPALSNTTKFKGVVQQQNGHWGAQIYADHRRIWLGTFKSAHEAAAAYDSASIKLRSFDANSHRNFPWSDFTLHEPDFQECYTTEAVLNMIRDGSYQHKFRDFLRIRSQIVANINIVGSKQVLGGGEGGQESNKCFSCTQLFQKELTPSDVGKLNRLVIPKKYAVKYMPFISDDQSEKETSEGVEDVEVVFYDRAMRQWKFRYCYWRSSQSFVFTRGWNGFVKEKNLKEKDIIVFYTCDVPNNVKTLEGQSKTFLMIDVHHFSGNGFVVPEEVNKTVHEISDEEMKTETLFTSKVEEETKSEEKKGGFMLFGVRIQ

SEQ ID NO: 896 - DNA, 1273 bp, Arabidopsis thaliana
cacacttaaagctttcgtctttacctcttcccttctctctctctatctaaaaagagttccgagaagaagatcatcatcaatggcgacttctctcttcttcatgtcaacagatcaaaactccgtcggaaacccaaacgatcttctgagaaacacccgtcttgtcgtcaacagctccggcgagatccggacagagacactgaagagtcgtggtcggaaaccaggatcgaagacaggtcagcaaaaacagaagaaaccaacgttgagaggaatgggtgtagcaaagctcgagcgtcagagaatcgaagaagaaaagaagcaactcgccgccgccacagtcggagacacgtcatcagtagcatcgatctctaacaacgctacccgtttacccgtaccggtagacccgggtgttgtgctacaaggcttcccaagctcactcgggagcaacaggatctattgtggtggagtcgggtcgggtcaggttatgatcgacccggttatttctccatggggttttgttgagacctcctccactactcatgagctctcttcaatctcaaatcctcaaatgtttaacgcttcttccaataatcgctgtgacacttgcttcaagaagaaacgtttggatggtgatcagaataatgtagttcgatccaacggtggtggattttcgaaatacacaatgattcctcctccgatgaacggctacgatcagtatcttcttcaatcagatcatcatcagaggagccaaggtttcctttatgatcatagaatcgctagagcagcttcagtttctgcttctagtactactattaatccttatttcaacgaggcaacaaatcatacgggaccaatggaggaatttgggagctacatggaaggaaaccctagaaatggatcaggaggtgtgaaggagtacgagttttttccggggaaatatggtgaaagagtttcagtggtggctaaaacgtcgtcactcgtaggtgattgcagtcctaataccattgatttgtccttgaagctttaaatgttttatctttctatattgatttaaacaaaatcgtctctttaaagaaaaaacattttaagtagatgaaagtaagaaacagaagaaaaaaaagagagagccttttttggtgtatgcatctgagagctgagtcgaaagaaagattcagcttttggattacccttttggttgtttattatgagattctaacctaaacactcagacatatatgttctgttctcttccttaattgttgtcatgaaacttctc

SEQ ID NO: 897 - protein, 314 aa, Arabidopsis thaliana
MATSLFFMSTDQNSVGNPNDLLRNTRLVVNSSGEIRTETLKSRGRKPGSKTGQQKQKKPTLRGMGVAKLERQRIEEEKKQLAAATVGDTSSVASISNNATRLPVPVDPGVVLQGFPSSLGSNRIYCGGVGSGQVMIDPVISPWGFVETSSTTHELSSISNPQMFNASSNNRCDTCFKKKRLDGDQNNVVRSNGGGFSKYTMIPPPMNGYDQYLLQSDHHQRSQGFLYDHRIARAASVSASSTTINPYFNEATNHTGPMEEFGSYMEGNPRNGSGGVKEYEFFPGKYGERVSVVAKTSSLVGDCSPNTIDLSLKL

SEQ ID NO: 898 - DNA, 1032 bp, Arabidopsis thaliana
atgatgatgaggaaaccggacattactacgatcagagacaaaggcaagccaaatcatgcatgtggtggtaataacaacaaaccgaagctaagaaaaggactttggtcgcctgatgaagatgagaagctgataagatacatgttgactaatggacaaggatgttggagtgacatcgctagaaatgctggtcttttacgttgtggtaaaagttgtcgccttcgctggatcaattacttgaggcctgatcttaaacgtggatccttctctcctcaggaggaggatctcatcttccatttgcattccattcttggtaacaggtggtctcaaatagctactcggcttccaggtagaacagacaacgagatcaaaaacttttggaactcgacattgaagaagcggcttaagaacaacagcaacaacaatacttcatcaggatcatcacctaacaatagtaatagtaattccttggacccaagagatcaacatgtggatatgggaggcaactcaacttcattgatggatgactatcatcatgatgaaaacatgatgacagtggggaacaccatgcgcatggactcttcctccccattcaatgttggaccaatggttaatagtgtgggcttaaaccaactttatgatcccttgatgatatcagtgccggataacggatatcaccaaatgggaaacacagtgaatgtgttcagcgttaatggtttaggagattatggaaacacaattcttgatccaattagcaagagagtatcagtagaaggtgatgattggttcattcccccctcggagaataccaacgtcattgcttgtagtacaagcaacaacctaaacttacaggcccttgatccttgcttcaatagcaaaaatctttgtcattcagaaagcttcaaggtagggaatgtgttggggatagagaatggttcttgggaaatagaaaaccctaaaatcggagattgggatttggatggtctcatcgataacaactcttcttttcccttccttgatttccaagtcgattga

SEQ ID NO: 899 - protein, 343 aa, Arabidopsis thaliana
MMMRKPDITTIRDKGKPNHACGGNNNKPKLRKGLWSPDEDEKLIRYMLTNGQGCWSDIARNAGLLRCGKSCRLRWINYLRPDLKRGSFSPQEEDLIFHLHSILGNRWSQIATRLPGRTDNEIKNFWNSTLKKRLKNNSNNNTSSGSSPNNSNSNSLDPRDQHVDMGGNSTSLMDDYHHDENMMTVGNTMRMDSSSPFNVGPMVNSVGLNQLYDPLMISVPDNGYHQMGNTVNVFSVNGLGDYGNTILDPISKRVSVEGDDWFIPPSENTNVIACSTSNNLNLQALDPCFNSKNLCHSESFKVGNVLGIENGSWEIENPKIGDWDLDGLIDNNSSFPFLDFQVD

SEQ ID NO: 900 - DNA, 605 bp, Arabidopsis thaliana
atctatctcttgccttagcctaagcacttctatctatctccttcttctttatcatcatccaaatgtcatctagctcaaacaagaattctaataaggatcatgatgatcatcataatgatcaaggccaacacaataccatccatactccgtctttcatgcacacctttgaaataagtaacatttcttctccatcttctccagtcgtatcggatcctaaaccagaatggaaaccaaatcaacatcaagctcaaatactcgaagaacttttcatcggcggtacggttaacccgtctctaaccagtatcaaacaaatcacgatcaaacttcaaagttatggtgaagaagtcgacgacgcagacgtctacaagtggtttcacaaccgaaaatatagtcgcaaaccgaaatcctgatctagaaatgttgaagatatacagtgggttaaaaccaaaatatataaagaggagtttgttataaacgctttatatttctatttattaagaattatgatagagaaaattactgtgataagttgtcatacttctataaatgtattttctgaaaaatattaattataattattcaaaatatagcatgaaaaaaaaaaa

SEQ ID NO: 901 - protein, 115 aa, Arabidopsis thaliana
MSSSSNKNSNKDHDDHHNDQGQHNTIHTPSFMHTFEISNISSPSSPVVSDPKPEWKPNQHQAQILEELFIGGTVNPSLTSIKQITIKLQSYGEEVDDADVYKWFHNRKYSRKPKS

SEQ ID NO: 902 - DNA, 894 bp, Arabidopsis thaliana
atggaagcgaagaaggaagagataaagaaaggtccatggaaagccgaagaagacgaagtactcatcaaccatgtcaagagatacggtcctcgtgattggagctccattcgatccaaaggtcttcttcaacgcaccggcaaatcctgtcgtcttcgttgggtcaataaactccgtcccaatctcaaaaatggatgcaagttctcggctgacgaagagaggactgtgattgagttacaatctgagtttggtaacaaatgggcgagaatcgctacgtatctaccgggaagaactgataacgatgtgaagaatttctggagtagcagacaaaagagactcgctaggattcttcataactcctctgatgcatcgagttcgagtttcaatcccaaatcttcttcttctcatcgactcaagggcaaaaacgtcaaaccaatccgtcaatcctctcagggttttggtttggttgaggaagaggttacagtttcttcttcatgttcccagatggttccttattcatctgatcaagttggtgatgaagtcttgaggttgccggatttgggtgttaagttagagcatcagcctttcgcttttggcactgatcttgtcctagcagagtactctgactcacagaatgatgcaaatcagcaagcaatcagccctttctctccagaaagcagagagcttttggctagacttgacgaccctttttactatgatatacttggaccagctgattcttctgagccattgttcgctctccctcagccgttcttcgagccttcgcctgtgccgagaagatgcagacatgtttcaaaggatgaagaagctgatgttttcttagacgatttcccagctgacatgtttgatcaggttgatccaatcccaagtccttag

SEQ ID NO: 903 - protein, 297 aa, Arabidopsis thaliana
MEAKKEEIKKGPWKAEEDEVLINHVKRYGPRDWSSIRSKGLLQRTGKSCRLRWVNKLRPNLKNGCKFSADEERTVIELQSEFGNKWARIATYLPGRTDNDVKNFWSSRQKRLARILHNSSDASSSSFNPKSSSSHRLKGKNVKPIRQSSQGFGLVEEEVTVSSSCSQMVPYSSDQVGDEVLRLPDLGVKLEHQPFAFGTDLVLAEYSDSQNDANQQAISPFSPESRELLARLDDPFYYDILGPADSSEPLFALPQPFFEPSPVPRRCRHVSKDEEADVFLDDFPADMFDQVDPIPSP

SEQ ID NO: 904 - DNA, 943 bp, Arabidopsis thaliana
aaaaaaaaaaacgttttctttttctttcaagaaatcaagatcaaaagaattagggttttcgaatgggtaggtgtggaagaagcaacgacggagtaattggtggagtaagaccatacgtacgatctccggtgcctcgtctgagatggacgccggagcttcaccggagtttcgttcacgccgttgatttgctcggcggtcaatataaagcaactccaaaacttgttctgaagataatggatgtcaagggactaaccatatcacacgtcaagagccatctccagatgtataggggatccagaatcactcttcttggaaaaccagaagagagttcttcaccatcttcaagaagaagaagaagacaagacaatgaagaagatcatcttcatgacaacttgtctgtacacgcaaggaatgattgtcttttgggttttcactcttttaactttagagagcagacttcagcgactgataatgatgacgatgactttcttaacatcatgaacatggagagaacgaagacatttgcaggcaatggcgagtccatcaaatttcagtctcatcactctctcgaggctgagaacacgaagaacatttggaaaaacacatggcgagaaaacgaacacgaagaagaagaagagttatcgctgtctctgtcgttgaatcatcctcataaccatcaacaaagatggaaaagcaatgcttcatcatcactcagtgaaacaagcgaagcagtctcatcttcttctggtccattcatcttcagagattgttttgcttcttcgaagattgatcttaatcttaatctctccttttctctactccatagctgaagctttgttcagctttgttcctttgttctaaattttagcgtagtgaacatttagattgtttttaaaccaccttaaaagttcctaatcttttagttaggcctcttgatttgtga

SEQ ID NO: 905 - protein, 255 aa, Arabidopsis thaliana
MGRCGRSNDGVIGGVRPYVRSPVPRLRWTPELHRSFVHAVDLLGGQYKATPKLVLKIMDVKGLTISHVKSHLQMYRGSRITLLGKPEESSSPSSRRRRRQDNEEDHLHDNLSVHARNDCLLGFHSFNFREQTSATDNDDDDFLNIMNMERTKTFAGNGESIKFQSHHSLEAENTKNIWKNTWRENEHEEEEELSLSLSLNHPHNHQQRWKSNASSSLSETSEAVSSSSGPFIFRDCFASSKIDLNLNLSFSLLHS

SEQ ID NO: 906 - DNA, 794 bp, Arabidopsis thaliana
gattagagcatcatcaatcggcatttagtactttgttagttaaatgatgcagtcgagagaggagatcagagatgattcatcatcaggtctcgtcctcaccactgaccctaagcctcgccttcgctggaccacagagcttcacgaacgcttcgttgacgccgtcactcaccttggaggccctgaaaaggctacaccaaagacaataatgagagttatgggtgtgaagggtctcactctttatcatctcaagagccatctccagaagttcagacttgggaagcagcctcacaaggagcatagtcaaaatcactccatttgtattagagatacaaatagagcttccatgttggatcttcgaaggaatgctgttttcacgactagtccgctcatcattggtcgcaatatgaacgagatgcaaatggaggtgcaaagaaggatagaggaagaggtagtaatagaaagacaggtgaatcaaaggatagcggcacaagggaaatacatggagagcatgttagagaaagcatgtgaaacccaagaagcaagcctcactaaagactactctactctatttttcgaccgcaccaatatttgtaacaacacatcgtccatcccaatcccatggttcgaggatcattttccttcctcttcctccatggactctacgttgattctccccgacatcaattccaacttctccctacaagattctaggagttccatcactaagggccgtacggtttgtctcggttagagaagagatatatcaaatatagatctagctacttgactctttc

SEQ ID NO: 907 - protein, 235 aa, Arabidopsis thaliana
MMQSREEIRDDSSSGLVLTTDPKPRLRWTTELHERFVDAVTHLGGPEKATPKTIMRVMGVKGLTLYHLKSHLQKFRLGKQPHKEHSQNHSICIRDTNRASMLDLRRNAVFTTSPLIIGRNMNEMQMEVQRRIEEEVVIERQVNQRIAAQGKYMESMLEKACETQEASLTKDYSTLFFDRTNICNNTSSIPIPWFEDHFPSSSSMDSTLILPDINSNFSLQDSRSSITKGRTVCLG

SEQ ID NO: 908 - DNA, 970 bp, Arabidopsis thaliana
ggtgaggaagtcaaaatcttgagagatctgagattgtaagaagatgaatcaagaagataaagagaagcctattgaagaagcttcttcatcaatggagagagaacacatgttcgacaaagtagtaacaccaagcgacgttggcaaactaaaccgactcgtgatccctaagcaacacgcagagagatacttcccattagataactccacaacaaacgacagcaacaaaggtttgcttctaaacttcgaagatcgaagtggaaactcatggaggttccgttactcttactggaacagtagtcaaagctatgtcatgactaaaggttggagccgttttgtcaaagacaagaagcttgatgctggagacatcgtttcttttcagagagattcttgtaataaagacaagctttacatcgattggaggagacgacctaagattcccgatcatcatcatcagcaattcgccggagctatgttccctaggttttacacttttcctcatcctcagatgccgacaaattacgaaactcacaacctttatcatcgatttcatcaacgagatctaggaattggatactatgtgaggtcaatggagaggagtcatccaacggctgtgattgaatctgtgccggtgatgatgcaaaggagagcacaagtggcttcaatggcttcgagaggagagaagcggttaaggctgtttggtgtagatatggagtgcggaggaggaggagggagtgtgaatagtacggaggaagagtcgtcgtcttccggtggtagtataccacgtggcagagtttctatggttggtgctggttctctcctccagttgaggttagtgagcagtgatgatgagtctttagtagcaatggaagctgcaagtcttgaggatcatcacttctttacaaagaaaggaaaaccttctttgtcttttgatttggataggtgatgattatgcatgagattaatcactatt

SEQ ID NO: 909 - protein, 299 aa, Arabidopsis thaliana
MNQEDKEKPIEEASSSMEREHMFDKVVTPSDVGKLNRLVIPKQHAERYFPLDNSTTNDSNKGLLLNFEDRSGNSWRFRYSYWNSSQSYVMTKGWSRFVKDKKLDAGDIVSFQRDSCNKDKLYIDWRRRPKIPDHHHQQFAGAMFPRFYTFPHPQMPTNYETHNLYHRFHQRDLGIGYYVRSMERSHPTAVIESVPVMMQRRAQVASMASRGEKRLRLFGVDMECGGGGGSVNSTEEESSSSGGSIPRGRVSMVGAGSLLQLRLVSSDDESLVAMEAASLEDHHFFTKKGKPSLSFDLDR

SEQ ID NO: 910 - DNA, 3300 bp, Arabidopsis thaliana
ataaacacggatacgagagaaagagagctcttgtgtccaaaccctagatttcaagatcgatctatcttctttctcgtgaagacaccgctctctactcgattcctatgattactctctagatccttttcaatttccccccgaaaggtttctcgattttgatcccccaaatcggagcttggagctaccggatcttatggagtgaagcccgatcatccgtttctttgttacaagttgtcgttttgtagctgcgaagattcctcggagaaggagatttggagacatcaccggcgccattctcagctcggcgatcacacggacgttctcgttccttgaatctgcaggaacttttccaggattcgttgatttggattgattttgctacacgcgtggagtttccttctgtgaagtcgaatcagcgaaatacaaattttcaatggcaatttattacaagtttaagagtgcaagggattatgataccattgccatggatggtccttttatatccgtcggtattctcaaagacaaaattttcgaaactaagcatttgggcactggtaaagaccttgatattgtcgtctccaatgcccaaactaacgaagagtatctggatgaagcaatgttaatcccaaagaatacatctgtccttattcgtcgggttcctggacgtcctcgcatcacagttattaccacacaagagcctagaatccagaataaagtggaagacgttcaggctgaaaccaccaattttcctgttgctgatccatctgctgctgaatttcctgaagatgagtatgacgagtttgggactgatctttattccattcctgatacccaagatgcccagcatattattccacgtcctcatcttgcaaccgcagacgacaaagtagatgaagaaagcaaaattcaggcgctgattgacactccagcacttgactggcaacaacgacaaggtcaagatacttttggagctggtagaggttatgggaggggtatgcctggaaggatgaatggacgtggttttggaatggaaaggaaaacgccacctccaggttatgtgtgccatcgttgcaatatccctggacattttattcagcattgccccacaaatggagaccctaactatgatgttaagagagttaagccacctactggtatccccaagtccatgttgatggcgaccccagatggttcttattccttgccaagtggcgcagttgcagttctgaaaccaaatgaggatgcttttgagaaggaaatggagggattgccatcaacaacacgttctgtaggagaacttccacctgagctaaaatgcccattatgcaaagaagtgatgaaagatgctgcgcttacaagcaaatgttgttacaagagcttctgtgacaagtgtatcagagatcacattatttcaaagtcaatgtgtgtttgtggaagatcagatgtacttgctgacgaccttctaccaaacaagaccctcagggataccataaaccgtattttggaagctggaaacgatagcactgagaatgtgggcagcgttggccatatcccagatttggagtctgcacgctgtccacctcccaaggctctatctcctactacatctgttgcatctaaaggcgagaagaaaccagtacttagtaacaataatgatgcttcaactttaaaggcgccaatggaagttgcagagatcacaagtgcccctcgtgcatctgcagaagtgaatgtagaaaagccagttgatgcatgtgaaagcactcaagggtccgtgattgtgaaagaagcaacagtgtcaaagttgaatacgcaagcccccaaggaagaaatgcagcagcaggttgctgctggagagccaggaaaaaagaagaaaaagaaaccaagagtgcctgggaatgacatgcaatggaatcctgtgccagatctagcaggccctgactatatgatgcaaatgggaccaggtccgcagtacttcaacggcatgcaacctggcttcaatggcgtacaaccaggcttcaacggtgttcaacctggcttcaatggctttcaccctggcttcaatggatttggaggcccgtttccaggcgcaatgcctccatttatgggttacggattaaacccaatggacatgggatttggtgggggtatgaatatgatgcatccagatccattcatggcacaaggatttgggttccctaatataccaccaccccatagggacctagctgaaatgggaaaccgaatgaatctccaacgtgctatgatgggcagagatgaagccgaagcccgaaacgctgagatgttaagaaaacgtgaaaacgagagacgacctgaaggggggaagatgtttagggatggagagaatagcagaatgatgatgaacaacggtacttcagcctctgcatcatccatcaaccctaataaatctagacaagcacctccaccaccaatccacgattacgatcgccggagacgaccggagaagagactatccccagagcatccgcctacgcgtaaaaacatttccccgtctcgcgactccaagagaaaatccgagcgttatcctgatgaacgagatcggcaacgcgaccgtgagaggtcacgtcaccaagacgtagatcgtgaacacgaccgtactcgcgaccgtcgcgatgaagacagaagccgagatcatcgccaccaccgtggtgaaaccgaacgcagccaacatcaccaccgcaagagatcggaaccgccttcatcggagccaccagtccctgctactaaagcagagatcgagaataatcttaagtctagcgtattcgctcggataagttttccggaggaagaaacatcttctggtaaacgaagaaaggtgccttcctcttcttctacttctgttacggatccatctgcttccgcctctgccgcagccgccgtgggaacatcagttcaccgacacagtagtcggaaggaaatagaagtagcagattatgaatctagtgatgaagataggcatttcaagaggaagccgtcaaggtacgcgcgatcaccaccggtggtggttagtgatgtgagtgaagataaactccgatactcaaaacgtggaaagggggagagatctcgagcttgacatggattttcaaacatgtttttttttttttttgtataatcaaaaacagagaatgagaatcttcttgttttgctgtaacgaacaaagagagagagttcttttgtcatcgaattcttttttaatttttgtagtggaattcgatttcgtaactactttattcttaatctatgagaccagcgaatttacag

SEQ ID NO: 911 - protein, 892 aa, Arabidopsis thaliana
MAIYYKFKSARDYDTIAMDGPFISVGILKDKIFETKHLGTGKDLDIVVSNAQTNEEYLDEAMLIPKNTSVLIRRVPGRPRITVITTQEPRIQNKVEDVQAETTNFPVADPSAAEFPEDEYDEFGTDLYSIPDTQDAQHIIPRPHLATADDKVDEESKIQALIDTPALDWQQRQGQDTFGAGRGYGRGMPGRMNGRGFGMERKTPPPGYVCHRCNIPGHFIQHCPTNGDPNYDVKRVKPPTGIPKSMLMATPDGSYSLPSGAVAVLKPNEDAFEKEMEGLPSTTRSVGELPPELKCPLCKEVMKDAALTSKCCYKSFCDKCIRDHIISKSMCVCGRSDVLADDLLPNKTLRDTINRILEAGNDSTENVGSVGHIPDLESARCPPPKALSPTTSVASKGEKKPVLSNNNDASTLKAPMEVAEITSAPRASAEVNVEKPVDACESTQGSVIVKEATVSKLNTQAPKEEMQQQVAAGEPGKKKKKKPRVPGNDMQWNPVPDLAGPDYMMQMGPGPQYFNGMQPGFNGVQPGFNGVQPGFNGFHPGFNGFGGPFPGAMPPFMGYGLNPMDMGFGGGMNMMHPDPFMAQGFGFPNIPPPHRDLAEMGNRMNLQRAMMGRDEAEARNAEMLRKRENERRPEGGKMFRDGENSRMMMNNGTSASASSINPNKSRQAPPPPIHDYDRRRRPEKRLSPEHPPTRKNISPSRDSKRKSERYPDERDRQRDRERSRHQDVDREHDRTRDRRDEDRSRDHRHHRGETERSQHHHRKRSEPPSSEPPVPATKAEIENNLKSSVFARISFPEEETSSGKRRKVPSSSSTSVTDPSASASAAAAVGTSVHRHSSRKEIEVADYESSDEDRHFKRKPSRYARSPPVVVSDVSEDKLRYSKRGKGERSRA

SEQ ID NO: 912 - DNA, 1366 bp, Arabidopsis thaliana
caaaaacaaaaaaaaacaatggaactatcattagcattaacatcaacagaccataatccatcgccttcagaggcacatccagatactatggactttctgtctcgagaatggtgtaatttcgctgttcaatcacttcatccagaccctatcctctacgatcgttccattgttcccgtcgagacatcgatcgccaagtttcaaggcgactcaagtcctgtttcttgtgctatgatggatacgagcatgaagatggacgatccagattttaagccctcgatgccttcatggaaaaccaatgatgtgaagtcatggatatggatgcaacaagcaatgcacccggaattgagctacgaaggctttttccgcaagaaacttaaacttccatggaaaattacgccgtcgataaagaaatggtggaaagagataaaggcgaaacgaaaggaagaagtgaggctacagagagctgaagtccacgccgccgtgtcattggctggtcttgccgctgctctcgccgccgtggcttcagagaacgctggaaaagatggtggaaacggtcgacctagcacgagggagactgctgtggcttctgctgcggctgtggtggcggcacaatgtgcgcaaatggcagagacaatgggagcaaacagagaccagctcagcacgatgattggttcagccatgaccgggacaagtgttagtgagatactcactctcactgcctcagctacaacttcgttgagaggtgccgcgacgctgaaagcaagaagaggttgcaagattaatagattgaatggctctgcacctgtgttgcctattgaagactcttcttatttgcctcctgaattcgataagaacacatctgttcttgctaagggaacagatctcttcgtcgagacaccagatggggatttcaaggctaggacggtttctatggtcttaaacaaagatggaaaggtgattcttaaaatgaagaaacataatctactcaggactaagaaagaaagtattgtgacgaatgttcatgtggaactttacaaagattcagatagcgaagacaacaacatagaggacacttgttatctcattgtcctgaggacgaacagaggagctatcaagttagacatggccgacgattacaatcgttacaagacatgggtcacaacgatccaacacatgctcactctctcttcttcctccttaagtacaaattacgctctcactttctacaacaaaaactaaaaaaattcatcgccttgttcatcgtttttctctgtgtaattttactttatcccctcctctgttttcttatgtctctctcgcttgatcttataatgtaatgcataaacaacttgagaacttacgttct

SEQ ID NO: 913 - protein, 406 aa, Arabidopsis thaliana
MELSLALTSTDHNPSPSEAHPDTMDFLSREWCNFAVQSLHPDPILYDRSIVPVETSIAKFQGDSSPVSCAMMDTSMKMDDPDFKPSMPSWKTNDVKSWIWMQQAMHPELSYEGFFRKKLKLPWKITPSIKKWWKEIKAKRKEEVRLQRAEVHAAVSLAGLAAALAAVASENAGKDGGNGRPSTRETAVASAAAVVAAQCAQMAETMGANRDQLSTMIGSAMTGTSVSEILTLTASATTSLRGAATLKARRGCKINRLNGSAPVLPIEDSSYLPPEFDKNTSVLAKGTDLFVETPDGDFKARTVSMVLNKDGKVILKMKKHNLLRTKKESIVTNVHVELYKDSDSEDNNIEDTCYLIVLRTNRGAIKLDMADDYNRYKTWVTTIQHMLTLSSSSLSTNYALTFYNKN

SEQ ID NO: 914 - DNA, 1878 bp, Arabidopsis thaliana
tctcagagcaaaaaacaaaaaaaaagaaaaaaaaaccctaaatctaaatctcaccttccacctctgtcttttttttttttgttcttttttttttttttactgtatcttctcttctctttgctctgcaaaaatctcacatccatggatccatctcttggtgatcctcatcatcctcctcagttcaccccttttcctcattttcccacctccaatcatcatcctttaggaccaaatccgtacaataaccatgtcgtcttccaaccgcagccgcaaacgcaaacgcaaatcccgcaaccgcagatgtttcagttatctccacatgtttcaatgccccaccctccttactccgaaatgatttgcgctgcgattgcggcgttaaacgaaccggatggttcgagcaagatggcaatttcgagatacatcgagagatgttacaccggtttaacttctgctcatgctgctttgttgactcaccatctcaagactttgaagaccagtggtgttctttctatggttaagaaatcttacaaaattgctggttcttctactcctcctgctagtgtagctgttgctgctgctgccgccgctcaaggtctcgatgttcccagatctgagattctccattcaagtaacaacgatcccatggcttctggctctgcttctcagcctctgaaacgaggtcgtggtcgtcctcctaagcctaaacctgaatctcaaccacaaccactacagcaacttccaccgaccaatcaagtccaggctaacggacagccaatctgggaacagcagcaagttcaatcacctgttccggttccgactccggttacagagtcggcgaagagaggacctggtcgtccaaggaagaacggttctgctgctcctgctactgcaccaatcgttcaagcttcggttatggctggaattatgaaacgtagaggtagaccaccgggtcgtcgagctgctgggagacagaggaagcccaaatccgtttcttctactgcctctgtgtatccttatgttgctaatggtgctagacgcagaggaaggcctaggagagttgttgaccctagcagtattgttagtgttgctccagtaggtggtgaaaatgtggcagcggttgcgccagggatgaagcgtggacgtggacgaccacctaagattggtggtgttatcagtaggcttattatgaagcctaagagaggacgaggacgtcctgtaggtagacccagaaagattggaacatcagtcacgactgggacacaagattctggagaactcaagaagaagtttgatatttttcaagagaaagtgaaagaaattgtgaaggtgttgaaggatggagttacaagtgagaatcaagcagtggtgcaagccataaaagatctggaagcactaacagtgacggagaccgttgagccacaagttatggaagaagtgcagccagaggagactgcagcaccacagactgaagctcaacaaactgaagctgctgagacacaaggaggacaagaagaaggacaagaaagagaaggagaaacacagacccagacagaagcagaggcaatgcaagaagctctgttctgaagaataataatgatctagaaaacaacctagacataatagccttggtgtttggcgttaggagtgtttttttttagttgttttaggtgttggaatcgcatcttaaattatataaaaatctataaggaattttaatttttctaggttttgttgtctgcagaagaagaaatagtagactcgttaatggtgttgttgtcggtgtgtctttaaccaaaccataagacgtggctgtaaattagcgatgtttctagtcttccatctttaataatctcttattgcgtctgtgcctttgttttt

SEQ ID NO: 915 - protein, 480 aa, Arabidopsis thaliana
MDPSLGDPHHPPQFTPFPHFPTSNHHPLGPNPYNNHVVFQPQPQTQTQIPQPQMFQLSPHVSMPHPPYSEMICAAIAALNEPDGSSKMAISRYIERCYTGLTSAHAALLTHHLKTLKTSGVLSMVKKSYKIAGSSTPPASVAVAAAAAAQGLDVPRSEILHSSNNDPMASGSASQPLKRGRGRPPKPKPESQPQPLQQLPPTNQVQANGQPIWEQQQVQSPVPVPTPVTESAKRGPGRPRKNGSAAPATAPIVQASVMAGIMKRRGRPPGRRAAGRQRKPKSVSSTASVYPYVANGARRRGRPRRVVDPSSIVSVAPVGGENVAAVAPGMKRGRGRPPKIGGVISRLIMKPKRGRGRPVGRPRKIGTSVTTGTQDSGELKKKFDIFQEKVKEIVKVLKDGVTSENQAVVQAIKDLEALTVTETVEPQVMEEVQPEETAAPQTEAQQTEAAETQGGQEEGQEREGETQTQTEAEAMQEALF

SEQ ID NO: 916 - DNA, 1040 bp, Arabidopsis thaliana
ctttagggacaccaaatctattcaacctaaaagccttcttttcccctatattgaccaactttttagcgaatcagaagaggaatggatgaggtatctcgttctcatacaccgcaatttctatcaagtgatcatcagcactatcaccatcaaaacgctggacgacaaaaacgcggcagagaagaagaaggagttgaacccaacaatataggggaagacctagccacctttccttccggagaagagaatatcaagaagagaaggccacgtggcagacctgctggttccaagaacaaacccaaagcaccaatcatagtcactcgcgactccgcgaacgccttcagatgtcacgtcatggagataaccaacgcctgcgatgtaatggaaagcctagccgtcttcgctagacgccgtcagcgtggcgtttgcgtcttgaccggaaacggggccgttacaaacgtcaccgttagacaacctggcggaggcgtcgtcagtttacacggacggtttgagattctttctctctcgggttcgtttcttcctccaccggcaccaccagctgcgtctggtttaaaggtttacttagccggtggtcaaggtcaagtgatcggaggcagtgtggtgggaccgcttacggcatcaagtccggtggtcgttatggcagcttcatttggaaacgcatcttacgagaggctgccactagaggaggaggaggaaactgaaagagaaatagatggaaacgcggctagggcgattggaacgcaaacgcagaaacagttaatgcaagatgcgacatcgtttattgggtcgccgtcgaatttaattaactctgtttcgttgccaggtgaagcttattggggaacgcaacgaccgtctttctaagataatatcattgataatataagtttcgtcttcttattctttttcactttttacctttttcactttcttaggttttgttttaacgtttgattaatacctgaaggtttttggaaaattttcgatcggataaaaggatttatgttgcgagccgaaacgcggcc

SEQ ID NO: 917 - protein, 265 aa, Arabidopsis thaliana
MDEVSRSHTPQFLSSDHQHYHHQNAGRQKRGREEEGVEPNNIGEDLATFPSGEENIKKRRPRGRPAGSKNKPKAPIIVTRDSANAFRCHVMEITNACDVMESLAVFARRRQRGVCVLTGNGAVTNVTVRQPGGGVVSLHGRFEILSLSGSFLPPPAPPAASGLKVYLAGGQGQVIGGSVVGPLTASSPVVVMAASFGNASYERLPLEEEEETEREIDGNAARAIGTQTQKQLMQDATSFIGSPSNLINSVSLPGEAYWGTQRPSF

SEQ ID NO: 918 - DNA, 639 bp, Arabidopsis thaliana
atgggcccaacatacagagctttgccagtaggtatgaggtttcgtccttcagatttggagttggctgtttactttttgatcaagaaagctttaggacttcccatgaaagctcttactgtgcccgacgaatgtaatgatatcttctcaacacatcctcgcgacttgcctggctatggaagcgaagagcattggtacttctactgcaagaaacccaagaatcaagttactagaacgaaatcttataacctctggataccaacgggagaaaaaactgatgtgttagatccaaagaagaatggcggcgaattagtcggtatcaagcattcgtttactttcattgagaacgaagaagaagaagaatctgataacaagaacggcgatgaagaagaacctccacaatgcaattggttcttggatgaaatcagcctcccattgacagttgtggatactgattggactctgtgtcatatcttttacgagaaggttaaacctgaatttggtaatttgcatatagtcgaatctgaatccgaatccgaagaagaagaagaagatgaaagtgttgataagcctgcagagagtttggatagtgttaaagagaaagatggaactgttcttcctccacctcctgctacaccttag

SEQ ID NO: 919 - protein, 212 aa, Arabidopsis thaliana
MGPTYRALPVGMRFRPSDLELAVYFLIKKALGLPMKALTVPDECNDIFSTHPRDLPGYGSEEHWYFYCKKPKNQVTRTKSYNLWIPTGEKTDVLDPKKNGGELVGIKHSFTFIENEEEEESDNKNGDEEEPPQCNWFLDEISLPLTVVDTDWTLCHIFYEKVKPEFGNLHIVESESESEEEEEDESVDKPAESLDSVKEKDGTVLPPPPATP

SEQ ID NO: 920 - DNA, 735 bp, Arabidopsis thaliana
atggaggagctggattttagttcaaaaacaacaacttctcgtctaaagctatttggatttagtgttgatggagaagaagatttctccgatcaatcagtcaaaactaacctatcttctgtatcaccggaacgtggcgagtttccggcaggatcttccggaagaagtggcggtggtgtacgaagccgaggcggaggaggaggaggaggagaacgtaagtatgagtgtcagtattgttgtagagagtttggtaactcacaagccttaggtggtcaccaaaacgctcacaagaaagagcgtcaacagcttaaacgtgctcagcttcaagctacacgaaacgcagccgcaaatttctcaaacgctggatcagcgtctcagtttttaaggaatcctatagtctctgcttttgctcctccgcctcatcttttatcatcatccgccgtgcctcagcctatgggaggtccttggatgtatcttccacgtgtttctccatctcaacttcacgtgtctcatggctgcgtcatccaagatggttcgggtggtgcgggtgctggtgggttctcgtacgagtatggggctcgtgattcagggtttggagtagttggggctcagatgagacatgttcaggcccatgggccgagaccatcggttaatgggttttcaagagaagtaggaactacttttgatgatggtttagggttggatttgcatctcagtcttgcacctgctggtcattga

SEQ ID NO: 921 - protein, 244 aa, Arabidopsis thaliana
MEELDFSSKTTTSRLKLFGFSVDGEEDFSDQSVKTNLSSVSPERGEFPAGSSGRSGGGVRSRGGGGGGGERKYECQYCCREFGNSQALGGHQNAHKKERQQLKRAQLQATRNAAANFSNAGSASQFLRNPIVSAFAPPPHLLSSSAVPQPMGGPWMYLPRVSPSQLHVSHGCVIQDGSGGAGAGGFSYEYGARDSGFGVVGAQMRHVQAHGPRPSVNGFSREVGTTFDDGLGLDLHLSLAPAGH

SEQ ID NO: 922 - DNA, 710 bp, Arabidopsis thaliana
ctcaatcatcttctaatcaaagatcaccaccatatggctctcgacactctcaattctcccacctccaccaccacaaccaccgctcctcctcctttcctccgttgcctcgacgaaaccgagcccgaaaacctcgaatcatggaccaaaagaaaacgtacaaaacgtcaccgtatagatcaaccaaaccctcctccttctgaagaagagtatctcgctctttgcctccttatgctcgctcgtggctcctccgatcatcactctccaccgtcggatcatcactctctttctccactgtccgatcatcagaaagattacaagtgttccgtctgtggcaaatctttcccgtcttaccaagcgttaggtggacacaaaacaagtcaccggaaaccggttagtgtcgatgttaataatagtaacggaaccgttactaataacggaaatattagtaacggtttagttggtcaaagtgggaagactcataactgctctatatgttttaagtcgtttccctctggtcaagcattgggtggtcacaaacgttgtcactatgatggtggtaacggtaacagtaacggtgacaatagccacaagtttgacctaaatttaccggctgatcaagttagtgatgagacaattggaaaaagtcaactctccggtgaagaaacaaagtcggtgttgtgaagaaacaaagtcggtgttgtgaggaataa

SEQ ID NO: 923 - protein, 215 aa, Arabidopsis thaliana
MALDTLNSPTSTTTTTAPPPFLRCLDETEPENLESWTKRKRTKRHRIDQPNPPPSEEEYLALCLLMLARGSSDHHSPPSDHHSLSPLSDHQKDYKCSVCGKSFPSYQALGGHKTSHRKPVSVDVNNSNGTVTNNGNISNGLVGQSGKTHNCSICFKSFPSGQALGGHKRCHYDGGNGNSNGDNSHKFDLNLPADQVSDETIGKSQLSGEETKSVL

SEQ ID NO: 924 - DNA, 1367 bp, Arabidopsis thaliana
ttttgtcggtttatgcagcactcgtcttcattcatagattttgatttgaggtaaactaaactcatcagatattaaaaatgggttctttacttctttcgatttcgtgtgtaaaggagaaacctttattgattctttcttgcttgtttgctgtttgatcatttgtctaagagaagaaggtcaaattttcaaatggaggaagggaaagagaattcgtttttgtgcaagtactgttacaagacgtttccttctgggaaagcactcggtggtcacattagaattcatacgaacgagaattcagttggttacaatggcaataagaagaagaggttggtggatcagagaaagatgatggctcagaaacataagcaacaacaacaagttggttgcagagaatgtggtagagtgttcgtttctttgaaagctcttagaggtcacatggcttgtcacggtgaggtaaagaagatgttgatggatgataatagccaatctgatactgaaagtgagacttcctcagctcctatgaggaaaagatccaagagggtggtcatgaaacaatcaaattctgaatctttgagtaatgggagctcgtcttttggttctgagattgaccaagaacgtagggatggggcttataatttgatgatgttgtcgagtgattctagtagtttcaagaaaagacgtaacatggtgatgaattctcttggtgagtcatctgacaacaactctgcgattgttgagaataagtcatcttcaggggatgagtttaagatcatgaatgtgaagaatgcagtagatgaccaatggagatctgctgatgatgatggagttagtctctgtgattcagatggctctgattctgattacttcatgaatggtccaagtaagtcggagtcagacatttctgttgacaggaacactggatttggatctggattcaacaactcattgatcaggttcaggaatagtaatgagggaggaacaaagtatgagctgagcaaaagcaagagagccttgttttcttatgaaactgattcatgtgcagacacaaacagcaagattcatcataggttcaaagatagcaaatcctcaatggttaagaaagaaggtggtgagaaggtgaagagcaaaggtcatgagtgcccaatttgcttcaggatgttcaaatcaggccaagctttaggtggtcacaagagatcacattccattgcaaaccacgcagctgaaatgcgtaaccaaatcgatctctatcttcctgtttcggatactgatgaatgaatcagaacctgagaactatagttctctctgatagtatttcatccccactttttgtttgttttctttgctccacattttagaactagatgaaa

SEQ ID NO: 925 - protein, 361 aa, Arabidopsis thaliana
MEEGKENSFLCKYCYKTFPSGKALGGHIRIHTNENSVGYNGNKKKRLVDQRKMMAQKHKQQQQVGCRECGRVFVSLKALRGHMACHGEVKKMLMDDNSQSDTESETSSAPMRKRSKRVVMKQSNSESLSNGSSSFGSEIDQERRDGAYNLMMLSSDSSSFKKRRNMVMNSLGESSDNNSAIVENKSSSGDEFKIMNVKNAVDDQWRSADDDGVSLCDSDGSDSDYFMNGPSKSESDISVDRNTGFGSGFNNSLIRFRNSNEGGTKYELSKSKRALFSYETDSCADTNSKIHHRFKDSKSSMVKKEGGEKVKSKGHECPICFRMFKSGQALGGHKRSHSIANHAAEMRNQIDLYLPVSDTDE

SEQ ID NO: 926 - DNA, 1000 bp, Arabidopsis thaliana
catggttcagagaaaactttatataagggctaattcaatgtcgttttgaaacatcaatccctagactaaagtgcgaaaatagtatgagtaatccgaacccagagaaaacgaaagtggatgttactgaggaagagaaagaggaatctgatgagcaatggagcgatgaagaaaccaatatgagagaaattgttctcggcctccctgctttgaatatcagcagtagaatatttggagagagtagtagtgtcgttgaggaagatgcagaaaaagcgcgtttgaatgagcaagcggttcttgcggcggggttgattttggctgcggcagaggaagcggttatgaaaggaatgaatgagggaagtgggagtggtgggaagaaaaagagtagaccaaggatatctacgcaaaccgatgacgaaggggatggtttgggtgaaggagaagcgaaaaagccgaagaagaaagcaaaggaattgactcatccaccgaaaggaccaccggtttgtcatatctgtggaagaggtttcggttcgtggaaggcagtgtttgggcatatgagggctcatagagatagaaactatcaagggtttcttcctcctcctacattctctgcgggggctgaaaggtttgtgattcccgggctaagatctgcttttactattgccactgtcggaggaggaagttctggtggtgtagcggtaggaggaagaagttccggtgatttttctggcagtggtggtggtgatgcgccaggatctgaaggtgggagaggttcaggtattgatttgaatgtggaacctgtggagcaagtagaggaagcgactgaatctggatgtattgccaagttcgatcttaataaatctccaccaaaagatgaagaggaagaggacaaacccaagtgaaagattttttcatactatttaataatttactataacacatagtatagttattattttcatatttcatatttgatatatttatctaacacattatgttgatt

SEQ ID NO: 927 - protein, 271 aa, Arabidopsis thaliana
MSNPNPEKTKVDVTEEEKEESDEQWSDEETNMREIVLGLPALNISSRIFGESSSVVEEDAEKARLNEQAVLAAGLILAAAEEAVMKGMNEGSGSGGKKKSRPRISTQTDDEGDGLGEGEAKKPKKKAKELTHPPKGPPVCHICGRGFGSWKAVFGHMRAHRDRNYQGFLPPPTFSAGAERFVIPGLRSAFTIATVGGGSSGGVAVGGRSSGDFSGSGGGDAPGSEGGRGSGIDLNVEPVEQVEEATESGCIAKFDLNKSPPKDEEEEDKPK

SEQ ID NO: 928 - DNA, 495 bp, Arabidopsis thaliana
atggttgcgagaagtgaggaagttgagatagtggaagatacggcggcgaaatgtttgatgttgttatcaagagttggagaatgcggcggaggaggagagaaacgagttttccgatgcaagacttgtcttaaagagttttcgtcgtttcaagctttgggaggtcatcgtgcaagccacaagaaactcattaacagtagcgatccatcacttcttggatccttgtctaacaagaaaactaaaacggcgacgtctcatccttgtccgatatgtggcgtggagtttccgatggggcaagctcttggtggtcacatgaggagacataggagtgagaaagcctcaccaggcacgttggttacacgttcttttttaccggagacgacgacggtgacgactttgaaaaaatcgagtagtgggaagagagtggcttgtttggacttagattcgatggagagtttagtcaattggaagttggagttgggaagaacgatttcttga

SEQ ID NO: 929 - protein, 164 aa, Arabidopsis thaliana
MVARSEEVEIVEDTAAKCLMLLSRVGECGGGGEKRVFRCKTCLKEFSSFQALGGHRASHKKLINSSDPSLLGSLSNKKTKTATSHPCPICGVEFPMGQALGGHMRRHRSEKASPGTLVTRSFLPETTTVTTLKKSSSGKRVACLDLDSMESLVNWKLELGRTIS

SEQ ID NO: 930 - DNA, 1346 bp, Arabidopsis thaliana
aaaggtgatgaatagaggtgtgttggagagttcgccggttcagcagctgatggcagccggaaaccctaattggtggaacgtaagcggcggcatgaggccaccaccaccgttgatgggtcatcagcaggcgccgttgccaccacatatgactcctaataacaattatctccgaccacggatgatgcccactcccttcccgcacttcttgccatctccggcgacttcttcttcttcctcttcttcttcaccgtctttgcctaataaccctaatctctcttcttggcttgaaagcaatgatctccctcctgagtcttggagccttagccaacttcttttgggtggattgatgatgggagaggaagagagattggagatgatgaaccatcataatcatcatgatgaacaacaacaccatggttttcaagggaagataagattggagaattgggaagaacaagtgttaagccaccaacaagcttccatggtggctgttgacatcaaacaagagggtaacattaacaacaacaatggctatgtcatatcttccccgaactcacctcctaacaaatcttgtgttacaacaactaccacaacaagcctcaatagtaacgacgataacatcaacaacaataataatatgttggatttctctagcaatcacaatggtcttcacttgtcagaagggagacacactcctccggatcgatcctctgagtgtaacagcttagagattggtgggtctactaataagaagccaaggctccaaccttctccttcgtcacaatcaaccctcaaggtgagaaaggagaaactaggaggccgaatcgcagcgcttcatcagctagtatctccatttggaaagactgacacagcctctgtcctgtcggaagctattggatacattagattccttcagagtcaaattgaggctctgagtcatccatactttggtacgactgcctcggggaatatgaggcaccaacaacatttgcaaggagataggagttgcatatttcctgaggaccctggtcagctcgtgaacgatcagtgcatgaagagaagaggagcttcgtcgtcatctacggacaatcaaaatgcaagtgaagagcctaagaaagatctgagaagtcgaggtttatgtcttgtcccaatctcatgcacactccaagtaggcagcgacaacggcgcggactattgggctccagcacttggctccgccggtttccattgagccaatgaaattacgccacgtggaattccagcgttagagaaaaatgatataacatcacgagcagtcagtctactgagaaaacaacaaattgagtttccaaggctgattgctcatg

SEQ ID NO: 931 - protein, 407 aa, Arabidopsis thaliana
MNRGVLESSPVQQLMAAGNPNWWNVSGGMRPPPPLMGHQQAPLPPHMTPNNNYLRPRMMPTPFPHFLPSPATSSSSSSSSPSLPNNPNLSSWLESNDLPPESWSLSQLLLGGLMMGEEERLEMMNHHNHHDEQQHHGFQGKIRLENWEEQVLSHQQASMVAVDIKQEGNINNNNGYVISSPNSPPNKSCVTTTTTTSLNSNDDNINNNNNMLDFSSNHNGLHLSEGRHTPPDRSSECNSLEIGGSTNKKPRLQPSPSSQSTLKVRKEKLGGRIAALHQLVSPFGKTDTASVLSEAIGYIRFLQSQIEALSHPYFGTTASGNMRHQQHLQGDRSCIFPEDPGQLVNDQCMKRRGASSSSTDNQNASEEPKKDLRSRGLCLVPISCTLQVGSDNGADYWAPALGSAGFH

SEQ ID NO: 932 - DNA, 1633 bp, Arabidopsis thaliana
attaccagagctcaacgagctctcactttctttacgcacacttgttggaacgaaatatattcatagagaagaagaatctcgaaactcttgaatctaaaacaactcggagactctgttttccctttccggagatcagatcggatcaagatgcagacaaccaacggctcagattcgacgttggcaacttccggagccacaccgccgaatcaacaaacccctcctccacctcagcagtggcagcagcagcaacagcaacagcaacagtggatggctgccatgcaatatccaccagcggcggcgatgatgatgatgcagcagcaacagatgctgatgtatcctcatcaatatgttccgtataatcaaggtccttatcagcagcatcatcctcagcttcaccaatacgggtcttatcaacagcaccagcaccagcaacacaaggctattgaccgtggatctggagatgatgtcaagactctttgggttggtgatcttcttcattggatggatgagacttatctccattcttgcttttctcacaccggcgaggtttcttctgtgaaagttatacgtaacaagctcacttctcaatcagaagggtatgggtttgttgagtttctttcacgtgctgcagctgaagaagttcttcagaactatagtggttcagtgatgccaaactcggaccaacccttccgtataaactgggcatcttttagtactggtgaaaaaagagcagtggaaaatggtccagacctatctgtttttgtgggagacttgtctccagatgtcactgacgttttattgcatgagaccttttctgatagatatccttctgtcaaaagcgccaaagttgtgattgattccaacaccggccggtccaaaggttatggttttgtgaggttcggtgatgaaaatgagaggtcaagggctttgacagaaatgaatggagcttactgttcgaacaggcaaatgcgtgtaggtattgcaactcccaaaagagcgattgctaatcagcaacaacattcttcacaagctgtgattctggctggtggacatggatcaaatggttccatgggttatggctcgcagtctgatggcgaatcaactaacgcaacaatatttgttggcggcattgaccctgatgttattgatgaagacctcagacaacctttttcccagtttggagaggttgtttcagtgaagatcccagtagggaaaggatgtggatttgtccaatttgctgacaggaagagtgctgaagatgctatcgagagtttgaacgggacagtcatcggcaagaacactgtcagactctcctggggacgaagcccaaacaagcagtggagaggagactcagggcagcagtggaatggaggatactcacgaggacatggttacaacaatggaggaggatatgctaaccaccacgactccaacaactatcatggggagaattgaagagactcatcaagtgatcatcttcatcatggtttcacatatcaaagctaaaacctgtagtcgaaagaagaattttgttagatggatttgattttgatagacttgttgtttggaggagattcaaaaattttggttactggtttgtctcagactaatataaatggttgcaacttgttgg

SEQ ID NO: 933 - protein, 435 aa, Arabidopsis thaliana
MQTTNGSDSTLATSGATPPNQQTPPPPQQWQQQQQQQQQWMAAMQYPPAAAMMMMQQQQMLMYPHQYVPYNQGPYQQHHPQLHQYGSYQQHQHQQHKAIDRGSGDDVKTLWVGDLLHWMDETYLHSCFSHTGEVSSVKVIRNKLTSQSEGYGFVEFLSRAAAEEVLQNYSGSVMPNSDQPFRINWASFSTGEKRAVENGPDLSVFVGDLSPDVTDVLLHETFSDRYPSVKSAKVVIDSNTGRSKGYGFVRFGDENERSRALTEMNGAYCSNRQMRVGIATPKRAIANQQQHSSQAVILAGGHGSNGSMGYGSQSDGESTNATIFVGGIDPDVIDEDLRQPFSQFGEVVSVKIPVGKGCGFVQFADRKSAEDAIESLNGTVIGKNTVRLSWGRSPNKQWRGDSGQQWNGGYSRGHGYNNGGGYANHHDSNNYHGEN

SEQ ID NO: 934 - DNA, 2304 bp, Arabidopsis thaliana
atggaaagtggcaacgttgtgaatacacaacctgaattatcaggcataattgatggatccaagagttatatgtacgagcagttatggaaactctgtgcgggacctttgtgtgatattccaaaacttggagaaaaggtttattactttcctcaaggccatatagagcttgtgagttctctctctctatattctttctctcttctttctctctctctctctctctctctctctctctctctctctctctctctctctctctctcctttctctctcttctctctcttctctctctcgcctctttctctctctctctctctctctctccttctctctcatgttgaggcatctacaagagaagagttgaatgagttacaaccaatttgtgattttccttctaagcttcaatgtcgtgttattgctattcaacttaaggtggaaaacaatagtgatgagacttatgctgagatcactttgatgccagatacaactcaagttgtaatccctactcagaatcaaaatcaatttaggccattagttaattcctttacgaaggttttaacggcctcagatacaagcgttcatggtggattctctgttccgaaaaaacatgccattgaatgtctccctccgctggatatgtcacagcctctaccgacacaagaaattcttgctatagatcttcatggtaatcaatggagattcagacacatctatagaggtacagcgcaaagacatttgttaacaattggttggaatgcattcacaacatcaaaaaaattggttgaaggagatgttattgtattcgttaggggagagactggagagttacgagttggtatcagacgagcaggacatcaacaagggaatataccttcatcaatagtatcaatagaaagtatgagacatgggataattgcttctgcaaagcatgcttttgataaccaatgtatgttcattgtggtttacaagccaaggtcaagtcaatttattgtcagttacgacaaattcttagacgttgtgaacaataagttcaatgtcggttcaagatttacaatgcggtttgagggtgatgatttctctgaaagaagatcttttgggacaattattggagttagtgatttctctcctcattggaagtgttcagagtggcgcagcttagaagtgcagtgggatgaatttgcatcatttccgagaccaaaccaagtttcaccatgggacatcgaacatttaacgccttggtcaaatgtttccaggtcatcttttctcaagaacaagcgttcacgagaagttaatgaaatcggttcttcctcatcacatctcttgcctcctacattgacacaaggacaagaaattggacaacaaagcatggccaccccgatgaatatttctcttcgttatcgtgatattactgaagatgctatgactccttctagattgctaatgagctaccctgtccaaccaatggccaaactaaattacaataatgtggttacaccaatagaagaaaatataacaaccaatgcagtcgctagttttaggttgtttggagtctctctggccactccttcggtgatcaaagatcccgttgaacaaattggcttggagatttctagacttactcaggaaaaaaagtttggtcaaagccaaattttgagatcaccaacagagatccaaagcaagcagttcagttctaccagaacttgtaccaaagttcaaatgcaaggtgtaacaataggaagagctgtggatttaagtgttcttaatggatatgatcagttaatactagaattggagaagctcttcgatctcaaaggccaattgcaagctcgcaaccaatgggaaatagctttcacaaataatgaagaggataagatgcttgttggagaagatccatggcctgaattctgcaacatgcgtgggtacgtcgcctcaaactccaaggatgatcctgcaaaggttgctgctagcttcacctcccaggtcgtcatcatgaaccaccttggtcagattaaaaatggttacaccccagttcttgattgccacacctctcacattgcagtcaagttctctgagatcttgaccaagattgactggcgtactggtcatgagattgagaaggagccaaagtttttaaagaacagtgaggccgctattattaatatgactcccaccaagcctatggtggttgaggcttactctgcgtacccacccctgggacgttttgctattagggacatgaggcaaaccgttggtgttggagttatcaagagtgttgtcaagaaggacccaagtggagccaaatga

SEQ ID NO: 935 - protein, 767 aa, Arabidopsis thaliana
MESGNVVNTQPELSGIIDGSKSYMYEQLWKLCAGPLCDIPKLGEKVYYFPQGHIELVSSLSLYSFSLLSLSLSLSLSLSLSLSLSLSPFSLFSLFSLSPLSLSLSLSLLLSHVEASTREELNELQPICDFPSKLQCRVIAIQLKVENNSDETYAEITLMPDTTQVVIPTQNQNQFRPLVNSFTKVLTASDTSVHGGFSVPKKHAIECLPPLDMSQPLPTQEILAIDLHGNQWRFRHIYRGTAQRHLLTIGWNAFTTSKKLVEGDVIVFVRGETGELRVGIRRAGHQQGNIPSSIVSIESMRHGIIASAKHAFDNQCMFIVVYKPRSSQFIVSYDKFLDVVNNKFNVGSRFTMRFEGDDFSERRSFGTIIGVSDFSPHWKCSEWRSLEVQWDEFASFPRPNQVSPWDIEHLTPWSNVSRSSFLKNKRSREVNEIGSSSSHLLPPTLTQGQEIGQQSMATPMNISLRYRDITEDAMTPSRLLMSYPVQPMAKLNYNNVVTPIEENITTNAVASFRLFGVSLATPSVIKDPVEQIGLEISRLTQEKKFGQSQILRSPTEIQSKQFSSTRTCTKVQMQGVTIGRAVDLSVLNGYDQLILELEKLFDLKGQLQARNQWEIAFTNNEEDKMLVGEDPWPEFCNMRGYVASNSKDDPAKVAASFTSQVVIMNHLGQIKNGYTPVLDCHTSHIAVKFSEILTKIDWRTGHEIEKEPKFLKNSEAAIINMTPTKPMVVEAYSAYPPLGRFAIRDMRQTVGVGVIKSVVKKDPSGAK

SEQ ID NO: 936 - DNA, 1461 bp, Arabidopsis thaliana
atgcagccattaaatatggctgagatattggatcaccgtggagtcttgaccgacggtgatgatggtccatttagaaatctaacaaacttctatgatatgttttcaagcaactttcctgaaggtttgcgagtgttagtcttcgatgaagatccatcgtatcttctgatattggagagacatctccaaaagtttcaataccaagtgactatatgcaacgaagtgaacaaagctatgcatacactccgcaaccataggaataggttcgacctcgctatgatacaagtaaataatgcagaaggtgatatattccggtttctctcggaaatcggatcggaaatggatcttccaatcatcataatatctgaagacgattcagtgaagtcggtgaagaaatggatgattaacggtgctgccgactatcttataaaaccgataagacccgaagatctacggatagtattcaaacatttggtaaagaagatgagagaaaggaggagtgtggtgaccggagaggcagagaaagcagcaggtgagaaatcatcctctgtcggagattccaccataagaaaccctaacaagagtaaaagaagtagttgccttgaagcagaagtcaacgaggaggatcgtcatgatcataatgatcgtgcttgtgcttctagtgccaagaaaagacgagtcgtttgggacgaggagcttcaccaaaactttctcaacgccgtggattttcttggactcgaaagagctgttcccaaaaaaatattagatgttatgaaggttgattacatcagtcgagaaaacgtagccagtcatcttcagaaattccggctcatgctgaagaaggagaatgatgaaaagattaagaaagaggagatgaacaaatctttaataaccccacaaaatggaagaatgtatgttggagaagatccatcaaatttctacagaggaagaaatgatcatttcccaacacatcatgtcaacaatattcctcaaccttcttatgtgccgcaacacaccttgaaccctaacaatctcaacacacagctcataccatctctcggacatcattttgatcatcgaggctctattgtggttcccgatacaaacctagagatgaatcaacaattttttcaccaccaacagacctcggacttcacgccagaagagaatcttggtgataacaactttactgaggaagatttaatgatggcatcaacatattatttgagcgagccggatgatgcttcttttgaaaagaagaatgggcatgaagttgtgccatcgcccatatttcattcgccgttttcctctaataagtaccaacgtagttcctttcttgatcagcaagaaagtggaggacttagctacaatactgttttttctaatgatgaatccaacattgggatttgcaagaagggatcaagatgggtcaagatcggagccaagcatgaagacggaagatga

SEQ ID NO: 937 - protein, 486 aa, Arabidopsis thaliana
MQPLNMAEILDHRGVLTDGDDGPFRNLTNFYDMFSSNFPEGLRVLVFDEDPSYLLILERHLQKFQYQVTICNEVNKAMHTLRNHRNRFDLAMIQVNNAEGDIFRFLSEIGSEMDLPIIIISEDDSVKSVKKWMINGAADYLIKPIRPEDLRIVFKHLVKKMRERRSVVTGEAEKAAGEKSSSVGDSTIRNPNKSKRSSCLEAEVNEEDRHDHNDRACASSAKKRRVVWDEELHQNFLNAVDFLGLERAVPKKILDVMKVDYISRENVASHLQKFRLMLKKENDEKIKKEEMNKSLITPQNGRMYVGEDPSNFYRGRNDHFPTHHVNNIPQPSYVPQHTLNPNNLNTQLIPSLGHHFDHRGSIVVPDTNLEMNQQFFHHQQTSDFTPEENLGDNNFTEEDLMMASTYYLSEPDDASFEKKNGHEVVPSPIFHSPFSSNKYQRSSFLDQQESGGLSYNTVFSNDESNIGICKKGSRWVKIGAKHEDGR

SEQ ID NO: 938 - DNA, 2152 bp, Arabidopsis thaliana
agagtacgcgggggtactatattcctttgaagagaggagacttgcaaacgtattgcatcaaatatggagtttggaagcactgaagatggaaggcatgacaagtttcctgtaggaatgagggttcttgctgtggatgacaatccaacctgccttcggaaactcgaagagttgctgcttcgttgcaagtatcatgtgacaaagacaatggagtcgaggaaagctctggaaatgctgagagaaaacagcaacatgtttgatctggtgataagcgatgtagagatgccagacacggatggttttaagttgcttgaaattggtcttgaaatggaccttcctgtcatcactcatagcgactatgacagcgttatgaaaggtattatacatggcgcttgcgattatctggtcaagcctgttggactcaaggagcttcagaatatatggcatcatgttgtgaagaagaacattaaatcttacgcaaaactgctcccaccttctgaatctgattccgtcccaagcgccagcaggaaacggaaagacaaagtcaatgacagtggtgatgaagatgacagtgacagagaagaggatgatggtgaggggagtgaacaggatggtgacgggtcaggtacgcggaagaagccacgtgttgtttggtctcaggagcttcaccagaagtttgtcagtgccgttcagcaattgggcctcgacaaggctgttcccaaaaaaatacttgatctcatgagtatagaaggtctcactagggaaaacgtagccagtcatttgcagaagtacagactgtacttgaaaaagatagacgaaggtcagcagcaaaatatgaccccagatgcatttggaacaagagattcatcttactttcagatggctcaacttgatggacttagagattttactgccgcaagacaaattccaagctcaggactcttatcgcgttcccatctcaccaaactccaaccccctatgtattcatcgataaatctccaaggaatgaactcctccagcttcatccaacaggggcatcaccagaactcaagcaattcagctaatccgtttggaacatatcacagtactctgtcaccaagaatccagaacgtgaatctgtttcagcgaacttcatctccactagaacccctccagtttcctagaagcaagtcatacattggagattttaaaggcttaggggacagagctattggcggtagcttcctagatacttgtatgccatttggtagctctagcacctctttaccaagtgcttccaccaatcctctaatgttgcaagcaaactatacacaacccctgcatatagcctcagatggaattcagccttgcatcgagggaactccgtccaactctgcctccccaaacatcagtttccaaggcttatctagatttcctggtcatagctggcaagggaatttgaacacaaccagattcccaccgagttccttaccactaaatcttgctttcttgccggatcaagtgacatgtgcagggaacaatctgggagattgtacttctttggtttctgcagagaatcctggtggagagatgcagtgtgatcctcaattacttggcggcttcatgcagaacgtgaatccgttaggcggacagaaatgggagcaacagaactgcaccatgctgaacaatccattcggtaacattgagtatcctctacccgcagataacatggttttcagagacaacaattcaaccagaagcaaaggcttggatgagtcactgatgaacccaatagacaacagtcaagagtatgttggaaaagctactacaatgctggatccagagatgaagtcgggaaagccagagaatgacaaccagcatgatgtattcgatgacataatgaatgagatgatgaaacaggaggagaataacggaatggtgccagtggctactagatttggctttgattcatttcctccaccttagctagtcatctctttctctaccagttgcattaagtttctccacttgagaccattttcatgtgatttttttaaatttcttcccacattgtttcctccgactgtcaatagatcatagtacaccaacctgtttcatactctcttttatgaattggaattgaaagcgagcctgttacaaaaaaaaaaaaaaaaaa

SEQ ID NO: 939 - protein, 632 aa, Arabidopsis thaliana
MEFGSTEDGRHDKFPVGMRVLAVDDNPTCLRKLEELLLRCKYHVTKTMESRKALEMLRENSNMFDLVISDVEMPDTDGFKLLEIGLEMDLPVITHSDYDSVMKGIIHGACDYLVKPVGLKELQNIWHHVVKKNIKSYAKLLPPSESDSVPSASRKRKDKVNDSGDEDDSDREEDDGEGSEQDGDGSGTRKKPRVVWSQELHQKFVSAVQQLGLDKAVPKKILDLMSIEGLTRENVASHLQKYRLYLKKIDEGQQQNMTPDAFGTRDSSYFQMAQLDGLRDFTAARQIPSSGLLSRSHLTKLQPPMYSSINLQGMNSSSFIQQGHHQNSSNSANPFGTYHSTLSPRIQNVNLFQRTSSPLEPLQFPRSKSYIGDFKGLGDRAIGGSFLDTCMPFGSSSTSLPSASTNPLMLQANYTQPLHIASDGIQPCIEGTPSNSASPNISFQGLSRFPGHSWQGNLNTTRFPPSSLPLNLAFLPDQVTCAGNNLGDCTSLVSAENPGGEMQCDPQLLGGFMQNVNPLGGQKWEQQNCTMLNNPFGNIEYPLPADNMVFRDNNSTRSKGLDESLMNPIDNSQEYVGKATTMLDPEMKSGKPENDNQHDVFDDIMNEMMKQEENNGMVPVATRFGFDSFPPP

SEQ ID NO: 940 - DNA, 1470 bp, Arabidopsis thaliana
atggggaaaactcaactcgctcctggatttcgtttccatccgactgatgttgaactcgtgaggtattacttgaagaggaaaatactggggaaaaagctccttgtcgatgctattgctgaagttgacatttacaagtttgaaccccctgatttacctgatatgtcttttataagaagtggggatcttaagtggcacttcttctgccccagggaaaagaagtatgctagtggggtaagggcaaaccgtgcaactgagtgtggctactggaagaccacggggaaggagagaccagttctgtgcaattctgaggttgtgggaaagatcaaaactctggtttatcactttggcaagtcgcctcgtggggagcggactgattgggttatgcatgaatacaggcttgacgacaaagtactgacgcagatgaatgttcctcaggatacttatgtggtgtgtgttctgttcaagaaagatggtcctggacctagaaatggagctcaatatggagctccgtttaaggaagaggactggagtgatgaggaagtacgtactgatgttccttctactagtaatcccacaaaccttcttgagcctagcaaagaaaccactctggctttgactgccccagatgactccaataaggattgttttggtggcatgatatcagagtcatgtgtctcggatttcctaccagctacaactaataccaccagcgagcttccacatccaagtgatgcagctaccactcctatgtctactgcacctctggcagagaccgttcagacccccaacaatgatgacttatattcaatgttggatctatttgatgatgacgaagagttcttagggttcaacaataatgaggtaagatatgatcccggtgtctcagctccagtttgcttagaagaagaaggcattttcaacggactaccagagttgagcagcatgccaaggacggcctcttacgacctagttgaaaactcggagttatacctagagctacaagacctcactgctccattaaatccccaaactgggctacaagacctcactgctccatttaatcctcaaactgggctacaagacctcactgctccatttaatcatcaaactgggctacaagaccacactgctccatttaatcctcaaactgggctacaagaccacactgctccatttaatcatcaaactgggctacaagacctcactgctccatttaatcctcaaactgggctacaagacctcactgctccatttaatcctcaaactgggctacatgacctcacttctccatttaatcctcaaactgggctacaagacctcactgctccattaaatcctcaaactgggaatcgcaatgacccgagaagctcctcctttctgtataatcaaggccattttgacttctctggtggtaatgatgatgatccttatggcttttctgcttccatgagacatagaccaaaaatgtaa

SEQ ID NO: 941 - protein, 489 aa, Arabidopsis thaliana
MGKTQLAPGFRFHPTDVELVRYYLKRKILGKKLLVDAIAEVDIYKFEPPDLPDMSFIRSGDLKWHFFCPREKKYASGVRANRATECGYWKTTGKERPVLCNSEVVGKIKTLVYHFGKSPRGERTDWVMHEYRLDDKVLTQMNVPQDTYVVCVLFKKDGPGPRNGAQYGAPFKEEDWSDEEVRTDVPSTSNPTNLLEPSKETTLALTAPDDSNKDCFGGMISESCVSDFLPATTNTTSELPHPSDAATTPMSTAPLAETVQTPNNDDLYSMLDLFDDDEEFLGFNNNEVRYDPGVSAPVCLEEEGIFNGLPELSSMPRTASYDLVENSELYLELQDLTAPLNPQTGLQDLTAPFNPQTGLQDLTAPFNHQTGLQDHTAPFNPQTGLQDHTAPFNHQTGLQDLTAPFNPQTGLQDLTAPFNPQTGLHDLTSPFNPQTGLQDLTAPLNPQTGNRNDPRSSSFLYNQGHFDFSGGNDDDPYGFSASMRHRPKM

SEQ ID NO: 942 - DNA, 1089 bp, Arabidopsis thaliana
atggagctgacgcaacccataagagaaaacggagacccgcagggacaccagctaacagatccagatgcagaggtggtatctttgtcaccaagaacgttactagaatcagatcggtacgtgtgtgagatctgcaaccaagggtttcagagagatcagaatctacagatgcatagaagacgacataaagtgccatggaagcttctgaagagagacaagaaggatgaggaagtgaggaagagagtctacgtgtgtcctgagccaacatgtctccaccatgacccgtgccacgctcttggagatctggtcggaatcaaaaagcacttccgccgtaaacacagtgtccacaagcaatgggtttgcgagagatgctccaaaggctatgcagttcaatctgactacaaagcccatctcaagacctgcggttcacgcggtcactcctgcgactgtggccgcgttttctccagggttgagagtttcatagagcatcaagatacttgcaccatccggcaacctcaacccaccaaccaccgtcatctacagcagcacacgatgggccttgacgctccatcaagaaccacttcgacagcaagcttcggccctttattgcatggacttcctttgttaagacctccacgaccgtccaatcaacattcaccagcttttgcttaccctttcaatgcttcatcagctcctttcgaaagcctcgaacttcaactatccataggaatggcaagaacatcagcacaagcgaggcacaacgaaaagagagagacgagtttaacaaaggagagagcgaacgaggaggcaaggaaggcagaggaaacgagacaagaagcgaaaaggcagatagagatggcagaaaaggattttgagaaagctaagagaataagggaagaagcaaaaaccgagttggagaaggctcacgttgttagagaagaagcaatcaagaggattaatgcaacaatgatggagatcacttgccactcttgcaagcaactatttcagctgcctgttacggctgatgagagtacgtcgtctcttgttatgagttacgtttcctcggcgacaactgaaggagaatgcgagtga

SEQ ID NO: 943 - protein, 362 aa, Arabidopsis thaliana
MELTQPIRENGDPQGHQLTDPDAEVVSLSPRTLLESDRYVCEICNQGFQRDQNLQMHRRRHKVPWKLLKRDKKDEEVRKRVYVCPEPTCLHHDPCHALGDLVGIKKHFRRKHSVHKQWVCERCSKGYAVQSDYKAHLKTCGSRGHSCDCGRVFSRVESFIEHQDTCTIRQPQPTNHRHLQQHTMGLDAPSRTTSTASFGPLLHGLPLLRPPRPSNQHSPAFAYPFNASSAPFESLELQLSIGMARTSAQARHNEKRETSLTKERANEEARKAEETRQEAKRQIEMAEKDFEKAKRIREEAKTELEKAHVVREEAIKRINATMMEITCHSCKQLFQLPVTADESTSSLVMSYVSSATTEGECE

SEQ ID NO: 944 - DNA, 1140 bp, Arabidopsis thaliana
aaatcataaaagcctctctcttagtctatttttatctcacggctctctctcccctctctacacacacaaacacaaataaagcgtaaaactgaaatattttaattacaattagaaagagaacatattaatatgtcaaatataacaaagaagaagtgtaatggaaatgaagagggtgcagagcagaggaaagggccttggacactcgaggaagacactcttctcaccaattacatttcccataacggtgaaggccgatggaatctgctcgctaaatcttctgggctaaagagagcaggaaaaagttgtagattgagatggttgaattaccttaaacccgacataaagcgtgggaatctcactcctcaagaacaacttttaatccttgagctccattctaaatggggtaataggtggtcaaaaatttcgaagtatttaccaggaagaacagacaacgatatcaaaaactactggagaactagagtccagaaacaagcacgccagctcaacatagattccaatagccacaagttcatagaagttgttcgtagcttttggtttccaagactgatcaacgagattaaagacaactcatacaccaacaatattaaagctaatgctcctgatttacttggaccaattttacgagacagcaaagatttgggtttcaacaacatggattgttccacttccatgtcagaagatctcaagaaaacttcacaattcatggatttttctgatcttgaaaccacaatgtccttggaaggatcacgagggggtagtagtcaatgtgtgagtgaggtttatagctccttcccttgcctagaggaggagtacatggtggccgttatgggcagttcagacatttcagcattgcatgattgtcacgtggctgattccaagtacgaggatgatgtgacacaagatctaatgtggaacatggatgacatttggcagtttaacgagtatgcacactttaattaggttatattatatttatgtacttcttacaacttggaggggtttatcggtcttttattaaattttgattgttttggattccttaaaaatgtgttcttattatagtttttaatgaaaaaaatgtttaagcgcaaaaaaaaaaaaaaaaaaaaaaaaaaaaaa

SEQ ID NO: 945 - protein, 283 aa, Arabidopsis thaliana
MSNITKKKCNGNEEGAEQRKGPWTLEEDTLLTNYISHNGEGRWNLLAKSSGLKRAGKSCRLRWLNYLKPDIKRGNLTPQEQLLILELHSKWGNRWSKISKYLPGRTDNDIKNYWRTRVQKQARQLNIDSNSHKFIEVVRSFWFPRLINEIKDNSYTNNIKANAPDLLGPILRDSKDLGFNNMDCSTSMSEDLKKTSQFMDFSDLETTMSLEGSRGGSSQCVSEVYSSFPCLEEEYMVAVMGSSDISALHDCHVADSKYEDDVTQDLMWNMDDIWQFNEYAHFN

SEQ ID NO: 946 - DNA, 828 bp, Arabidopsis thaliana
atgagtaatcccgagaagtctaaaattgctgaggaagagaatgagaattttgacgagagtgattatctttggagcgatgaagaaggagacatacgtgaaattgttcttggccttcctgcactaagacttagtgagagtctcaatgtggatgaaagcatccgtaacgaagccgtttccgcggcgaagttgatcgtggcagccgccaaggaagccacagggaatacagaacaaagtgctagtggtaccggtgacgttagtggaactccagaaatcataaaagttgggaaaccccgtgtattattggaagcgctggccgaagcatctggttgtacccctattggggtgaccactactgaaggagaggtagtcaagaaaccccgtaagaaaggttctactcagttgacacatctgccgcaaggccctcctatgtgtaatgtttgtgggaagggctttgcttcttggaaggctgtttttggacatctaaggcagcataaggatcgagggtatctaggttttcttcctccgccaacattcaatgctgctgaggaaggatttggtggagttgctactgcttcaaccggtggtgcagtagccactgctatttccgttggtgaagtccctactgcttcttccgctggtggactcgctacggcttcttccgatggtgaagggcttgtttcaagtatcggaagggcgaggattgacttaaatgccgatccagtcgaggaggaagacaaggtaattggagttggatctaagcgaaaatttgatctgaataggtcccccccaccagacggtgatgaagagaacgatgataaagtcgagtga

SEQ ID NO: 947 - protein, 275 aa, Arabidopsis thaliana
MSNPEKSKIAEEENENFDESDYLWSDEEGDIREIVLGLPALRLSESLNVDESIRNEAVSAAKLIVAAAKEATGNTEQSASGTGDVSGTPEIIKVGKPRVLLEALAEASGCTPIGVTTTEGEVVKKPRKKGSTQLTHLPQGPPMCNVCGKGFASWKAVFGHLRQHKDRGYLGFLPPPTFNAAEEGFGGVATASTGGAVATAISVGEVPTASSAGGLATASSDGEGLVSSIGRARIDLNADPVEEEDKVIGVGSKRKFDLNRSPPPDGDEENDDKVE

SEQ ID NO: 948 - DNA, 540 bp, Arabidopsis thaliana
atgtcaccggaggaatacgttagggtttggccggattccggtgatcttggaggaactgagctgaccctagctttgcctggcactccgacaaatgcatcggaaggtccaaaaaagttcgggaacaaacgtagattcctcgagaccgttgatttaaaactcggggaagcacacgagaacaattatatctcaagcatggtcactaatgaccagttggtgggctggccgccggtagcgacagcgaggaaaacagtgaggcggaaatacgtgaaagtggcgttggatggtgcggcctatctcagaaaggttgatcttgggatgtacgattgctatggacagcttttcaccgctctagaaaacatgtttcaggggataataacaatatgtagagtgacagagttggagaggaagggagagtttgttgctacttacgaggataaggacggtgacttgatgttagtcggagatgtgccgtggatgatgtttgtggaatcttgcaaacgtatgaggttaatgaaaaccggagatgctattggattatag

SEQ ID NO: 949 - protein, 179 aa, Arabidopsis thaliana
MSPEEYVRVWPDSGDLGGTELTLALPGTPTNASEGPKKFGNKRRFLETVDLKLGEAHENNYISSMVTNDQLVGWPPVATARKTVRRKYVKVALDGAAYLRKVDLGMYDCYGQLFTALENMFQGIITICRVTELERKGEFVATYEDKDGDLMLVGDVPWMMFVESCKRMRLMKTGDAIGL

SEQ ID NO: 950 - DNA, 1209 bp, Arabidopsis thaliana
atggaagacgaacatcaagatctccataaacccattaatggagctttgcgagacctcaagattactcggtcacagaaagaaacagaaaagtctacgaaccaacagcaagatgttacttgttactatggtctaagggaaaactcgaagaagaaaacccaggaatctccggaaccaatgaagaagattttgtttcgatgcgaagaatgtggaaaagggtttcggtacgagaaatattttaagaatcatcgctcgatgatgcatttatcgccgaacgagaaggtttgtgaagaatccttgatgactctgtctcgtagccttgggtttgtgaagaagaagaaaagatcaagacttggtaggtctgggaagactttatttactacgtttcttgaaccgagttctatttttgatgcgactgatgaagaattagaagtggcggattgtttgattctattgtctaagagtgctcccaaggttgtagacgaattgaaaagtctttctgaggcagtacgtgttactcctgaaacacctgaaagtagctatgatttgggttgtttgctcaacaagaaaccgagaaaaggtggtgaattggaatctggggttttaagtaatgagcaaagacttatggaagaagggtttagtagttatggaacatcgaaagaaccagctagcttcttgagagacgaaaacagattggatcagcagaaacggagaaaagatggtgaatttgaatccggacttttgagtaatgagcaaagactgctagaagaagagattactactcctgtgacattcaaaggtccagcgagttccttgagacacaagtgtgctttggatcgaaatggaggtgaatttggtcctgagtttttgagtaatgagcaaacactgatggaagaaacatggaaagaaccagtgagtttcttagaagataagcatgaatttgatcagcggaaaatgcgagaagctggcgactttgaatctaggttttacagaattgagcttggagtaggagctatggagtgtacttcttcagatactgatatgctcacgcaatctgataagaagaacgttgagcatcgatgcaggttgtgcaacaagatattctcgtcttatcaagctctagggggtcatcagacgtttcatcggatgagcaaatgtaagaacaagaagaatggcatagaggaatcagttgaacccaggatgactctgtga

SEQ ID NO: 951 - protein, 402 aa, Arabidopsis thaliana
MEDEHQDLHKPINGALRDLKITRSQKETEKSTNQQQDVTCYYGLRENSKKKTQESPEPMKKILFRCEECGKGFRYEKYFKNHRSMMHLSPNEKVCEESLMTLSRSLGFVKKKKRSRLGRSGKTLFTTFLEPSSIFDATDEELEVADCLILLSKSAPKVVDELKSLSEAVRVTPETPESSYDLGCLLNKKPRKGGELESGVLSNEQRLMEEGFSSYGTSKEPASFLRDENRLDQQKRRKDGEFESGLLSNEQRLLEEEITTPVTFKGPASSLRHKCALDRNGGEFGPEFLSNEQTLMEETWKEPVSFLEDKHEFDQRKMREAGDFESRFYRIELGVGAMECTSSDTDMLTQSDKKNVEHRCRLCNKIFSSYQALGGHQTFHRMSKCKNKKNGIEESVEPRMTL

SEQ ID NO: 952 - DNA, 750 bp, Arabidopsis thaliana
atgaaggttcatgagttttcgaatgggttttcttcatcgtgggatcaacatgactcgacatcatcccttagcctaagctgcaaacgcctccgtcctctcgcccctaagctctccggcagccctccctcccctccttcttcttcctccggcgtcacttcagccacttttgaccttaaaaacttcattagacccgatcaaaccggtccgacaaaatttgaacacaaacgagaccctcctcatcaaacgcacccgggagggacaaggtggaacccgactcaagaacagatagggatacttgagatgttgtacaaaggtggaatgcgtactcctaatgctcaacagattgagcatatcacattgcaactcggtaagtacgggaaaatcgaagggaaaaatgtgttctattggttccagaaccacaaagcccgcgagagacagaagcagaagaggaacaacctcatcagcctaagttgccaaagcagcttcacgaccactggtgtctttaatccgagtgtaactatgaagacaagaacatcatcgtcactagacattatgagagaaccaatggtggagaaggaggagttagtggaagagaatgagtacaagaggacatgtaggagctggggatttgagaacttggagatagagaacaggagaaacaaaaatagtagtactatggcaactacttttaataaaatcattgacaatgtaaccctcgagctttttcctctccatcctgaagggagatga

SEQ ID NO: 953 - protein, 249 aa, Arabidopsis thaliana
MKVHEFSNGFSSSWDQHDSTSSLSLSCKRLRPLAPKLSGSPPSPPSSSSGVTSATFDLKNFIRPDQTGPTKFEHKRDPPHQTHPGGTRWNPTQEQIGILEMLYKGGMRTPNAQQIEHITLQLGKYGKIEGKNVFYWFQNHKARERQKQKRNNLISLSCQSSFTTTGVFNPSVTMKTRTSSSLDIMREPMVEKEELVEENEYKRTCRSWGFENLEIENRRNKNSSTMATTFNKIIDNVTLELFPLHPEGR

SEQ ID NO: 954 - DNA, 1050 bp, Arabidopsis thaliana
atggtgaaaggcacgaagagaaagattgcgattgagacgatacagaagagagattcccttagggttacctgcaccaaacgccgtaaaggtctctatagcaaagcctctcagctttgtcttctctccgacgcacaaatcgctatcttagcgactcctccttcttctgaatccgacgtctctttctactctttcggtcactcctctgttgatgccgttgtctctgcttttctctccggaaaacgtcctgtttcggctccgaaggataacaaagagacgagggaggacgttggtatctgtttgactcgcaagaatctagggttagggttttggtggaatgacgagagccttgtgagatcggagaatcctcaagagattagtgaagcgatcggttccatgtggactctgttgagtaatctcaaggagttgcgtgcggatgaagcttgcgttaacgatcacaaggacttgaagaagaatgagaagagcgatgttcacggaactcaagatcaaaccctaatttttcagtccgcttctgcagtttgttgcatccctgaaaatctcaacgatattactcaagagccaaatcaaaccctagatattcagtccagtagttctgcaatctgttgcgtccctgataaatcacctgaaattttcaatgaaatcactgaagaacaagatcagattctctcgatttgtgaaactttttgtgttacggataataacaacaacaacaacaacaacgctgctttacctgaagttaacctatattacaatcaagacatggctattgatcaactcattgacttcaacaccccttttgaaagctcgatagatgattggttttcggacaacactactcatcaggagacgactagtgcaagtattttgaacgatgttggtgttgatgatcaagtctcggtggatacaaatccgttttcttattttcaaagccttgaagatgcagatttggtgtttcagagatgtttggatggagataatctacgattctctgattgtttcaatgactttgcaaacactattgcagcagtttga

SEQ ID NO: 955 - protein, 349 aa, Arabidopsis thaliana
MVKGTKRKIAIETIQKRDSLRVTCTKRRKGLYSKASQLCLLSDAQIAILATPPSSESDVSFYSFGHSSVDAVVSAFLSGKRPVSAPKDNKETREDVGICLTRKNLGLGFWWNDESLVRSENPQEISEAIGSMWTLLSNLKELRADEACVNDHKDLKKNEKSDVHGTQDQTLIFQSASAVCCIPENLNDITQEPNQTLDIQSSSSAICCVPDKSPEIFNEITEEQDQILSICETFCVTDNNNNNNNNAALPEVNLYYNQDMAIDQLIDFNTPFESSIDDWFSDNTTHQETTSASILNDVGVDDQVSVDTNPFSYFQSLEDADLVFQRCLDGDNLRFSDCFNDFANTIAAV

SEQ ID NO: 956 - DNA, 1287 bp, Arabidopsis thaliana
ccatcttttctttctctctctctctctctttatataagtcattcataaaatcacaataaacacaacaaagcaaaaagggtaaaatgagcattcaattcaatatgactaatgctcaagagttggggcaagagggttttatgtggggcatatccaattctgatgattccggaggtggttgcaaaagaatcgagaaagaaccgcttccatcacatccgtctcatccgtcgccagagatccagactacgacggttaaaaagggaaaaaagagaacgaaaagaaatgataaaaaccatgaagaagaatcacctgatcatgaaatacatatatggaccgaaagagaaaggagaaagaagatgagggacatgttttctaaattacatgctttgcttccccaacttcctcctaaggcagacaaatcaacaattgtagatgaagcagtgagttcaatcaaatcccttgaacaaactttgcaaaaacttgaaatgcaaaagcttgagaagcttcagtattcttctgcctcaacaaacacaactcctactacaacttttgcttatgctccatcatcatcctcttctccaacagctctcctcacaccaatatcaaaccatcccatagacgccaccgcaacagattcttaccctcgcgcagctttcttggccgatcaggtatcttcttccagtgccgctgctgcgaacctgccttacccttgtaatgatccgatcgtgaatttcgatacttggtcctcacgtaacgtggtgctgactatctgtgggaatgaagctttcttcaatttgtgtgtccctaaacacaaaccaggggttttcacttctgtttgttacttgtttgagaagtacaacatggaggttttgtttgctaatgtctcctctaatgttttctggagcacctacgtgatccaagcacaggtaaatccgagttgtgagaatcagttactgggaaatggtcttggagttgtagacgttttcaagcaagtttctcaagaactggtgttatatttttcatctctataaatcataactggctgcttcggtttgagttttaagtattttcagggtttgttttctttgcgaagtcccaaggcttatgcagagagattagcttggacttttcactttaaaccccatcatcagaaggaaagaaagaaaaaaaaaggaataagagaagatatatagcttcttcggacattgtttttttcgcaattttaattttatcttctttatcaatgtattggcaaatgttatcaaatgagatatttaagttccaaaaaaa

SEQ ID NO: 957 - protein, 314 aa, Arabidopsis thaliana
MSIQFNMTNAQELGQEGFMWGISNSDDSGGGCKRIEKEPLPSHPSHPSPEIQTTTVKKGKKRTKRNDKNHEEESPDHEIHIWTERERRKKMRDMFSKLHALLPQLPPKADKSTIVDEAVSSIKSLEQTLQKLEMQKLEKLQYSSASTNTTPTTTFAYAPSSSSSPTALLTPISNHPIDATATDSYPRAAFLADQVSSSSAAAANLPYPCNDPIVNFDTWSSRNVVLTICGNEAFFNLCVPKHKPGVFTSVCYLFEKYNMEVLFANVSSNVFWSTYVIQAQVNPSCENQLLGNGLGVVDVFKQVSQELVLYFSSL

SEQ ID NO: 958 - DNA, 1202 bp, Arabidopsis thaliana
gtaacaacgcagagtacgcggggaagttgcaagccatgactaatcttgatgagtttcttgaagagctaagttctattgaatcacattctcagaaaatcgtgaagatagatgagcatttaaaaaagttggatgaagagacgaaagaagatgaagatgaagatgcggcgaagataattcaagatcggagtaccgcgagagaagcagaaattgctctacttatggatctccgtcagaactttcttccaccaccatcgatgtcatcctcctctcttcaaccaccgtcatcgtcaactctcgcaccatcgtcatcatcctctcttcaaccacccgcaccgttgatagacttctttcggtcatcagtgtcatactctcatcaaccaccgtcatcttcaactctcgcaacatcatcgtcaccgtctcttcaaccaccgtcgatgtcatcctcctctcttcaaccacccgcatctttgagggaattctttacgtcgtcagtgtcatactctcatcagccatcttcatcttcaactctcgcaacatcttcgttctttccgtcgtcaatgccatactctgttcgacctcccgattcgtctgatcgaccatctttgagggaattctttccgtcgtcaccatcatcctctattcagccacccgaatcatcatcatctaagcgagcacggcttagtaacatctttccgtcacctttatcctcctctccgtcaccgtttgttaacccgtttctccgtccgcaggcccaagaaccaacaataccaaatttcataaacccaataccacagatctctccaggcctacctgctctattcccaaaccctaaccctaatcctaaccctaacccaatcccaaacccaatccgaaacccagacttggtgtggacaaataggcttcaactagtgtttgatgacgcagttgtcagacttgggggattattcagtgcaacacccaaagccataaacgaactaatttctgaagagggtctcactggtgaccagatccgtagccacttacaagtcttgcgggatcgtcaaaaggctattgcagacaaattagccttggagtgaagaaaatattgaagatgagagataggattaaatagaaagagtgatagtatagaacgtttctttttcttttgttgttaatcttgcatattacaaacaattactatatcataatagaatttatgttaa

SEQ ID NO: 959 - protein, 346 aa, Arabidopsis thaliana
MTNLDEFLEELSSIESHSQKIVKIDEHLKKLDEETKEDEDEDAAKIIQDRSTAREAEIALLMDLRQNFLPPPSMSSSSLQPPSSSTLAPSSSSSLQPPAPLIDFFRSSVSYSHQPPSSSTLATSSSPSLQPPSMSSSSLQPPASLREFFTSSVSYSHQPSSSSTLATSSFFPSSMPYSVRPPDSSDRPSLREFFPSSPSSSIQPPESSSSKRARLSNIFPSPLSSSPSPFVNPFLRPQAQEPTIPNFINPIPQISPGLPALFPNPNPNPNPNPIPNPIRNPDLVWTNRLQLVFDDAVVRLGGLFSATPKAINELISEEGLTGDQIRSHLQVLRDRQKAIADKLALE

SEQ ID NO: 960 - DNA, 1253 bp, Arabidopsis thaliana
gcttaaaggtctctttcatggagctgtttcctgctcagcccgatttatccttacaaataagtccaccaaacagtaaaccatcatcgacatggcagagaagaagatcaacaacagatcaagaagatcatgaagaactcgatttagggttttggagaagagctcttgattcaagaacatcttctctcgtctctaattccacctcaaaaacaatcaatcatccattccaagacctctcgctctctaacatctctcatcatcaacaacaacaacaacatcatcatccacaacttctccctaattgcaacagctctaacatcttgacctctttccaatttccgacacagcagcaacaacaacacttacaagggtttcttgctcacgaccttaatactcacttaagaccaataagaggaataccactttaccacaaccctcctccacatcatcatcctcaccgtccgccaccgccatgtttccctttcgacccgtcgtctctaataccctcttcctccacttcctcgccggctctaaccggaaacaacaatagctttaatactagtagcgttagtaaccctaattaccacaatcatcatcaccagactctaaacagagccagattcatgccaagattcccagctaaacgaagcatgagagctcctaggatgcgatggaccaccactcttcatgcccggttcgttcacgccgttgaattactcggtggccatgaaagagcaacacctaaatcagttcttgagctcatggatgtcaaagatctaaccttggctcatgttaagtcccatttacagatgtacagaacagtgaagacaaccgacaaagcagcagcttcgtcaggacaatctgatgtctatgaaaatggatcatcaggagataataactcagacgactggatgttcgatatgaatagaaaatcgagagatagcgaggaattgacgaatcctctagagaaatcaaatggtctatggaccaattcttccggagaagcacgtttgcatgggaagttaatcgataatgttgcagaaattatgctaccttctgagaaggaactagatggaaagtgctcaagttatgagagaatatcatcagaagagatgagctcatcaagcatctcgggaacaagccctttcaagccaaatcttgagtttactctgggtcgatctcactaaatttattgttgtagctaggtagtaattaattagtatcaattaacttatattttggctactgactagttt

SEQ ID NO: 961 - protein, 388 aa, Arabidopsis thaliana
MELFPAQPDLSLQISPPNSKPSSTWQRRRSTTDQEDHEELDLGFWRRALDSRTSSLVSNSTSKTINHPFQDLSLSNISHHQQQQQHHHPQLLPNCNSSNILTSFQFPTQQQQQHLQGFLAHDLNTHLRPIRGIPLYHNPPPHHHPHRPPPPCFPFDPSSLIPSSSTSSPALTGNNNSFNTSSVSNPNYHNHHHQTLNRARFMPRFPAKRSMRAPRMRWTTTLHARFVHAVELLGGHERATPKSVLELMDVKDLTLAHVKSHLQMYRTVKTTDKAAASSGQSDVYENGSSGDNNSDDWMFDMNRKSRDSEELTNPLEKSNGLWTNSSGEARLHGKLIDNVAEIMLPSEKELDGKCSSYERISSEEMSSSSISGTSPFKPNLEFTLGRSH

SEQ ID NO: 962 - DNA, 1332 bp, Arabidopsis thaliana
gatctctctccctctctctctctctctccgggaaaaatggataacttcttaccctttccctcttctaacgcaaactctgtccaagaactctctatggatcctaacaacaatcgctcgcacttcacaacagtccctacttatgatcatcatcaggctcagcctcatcacttcttgcctccgttttcatacccggtggagcagatggcggcggtgatgaatcctcagccggtttacttatcggagtgttatcctcagatcccggttacgcaaaccggaagtgaattcggttctctggttggtaatccttgtttgtggcaagagagaggtggttttcttgatccgcgtatgacgaagatggcaaggatcaacaggaaaaacgccatgatgagatcaagaaacaactctagccctaattctagtccaagtgagttggttgattcaaagagacagctgatgatgcttaacttgaaaaataacgtgcagatctccgacaagaaagatagctaccaacagtccacatttgataacaagaagcttagggttttgtgtgagaaggaattgaagaacagcgatgttgggtcactcgggaggatagttctaccaaagagagatgcagaagcaaatcttccgaagctatctgataaagaaggaatcgttgtacagatgagagatgttttctctatgcagtcttggtctttcaaatacaagttttggtccaataacaagagcagaatgtatgtcctcgagaacacaggagaatttgtgaagcaaaatggagctgagataggagactttttaacaatatacgaggacgaaagcaagaatctctacttcgccatgaatggaaattcgggaaaacaaaatgaaggaagagaaaatgagtcgagggaaaggaaccactacgaagaggcaatgcttgattacataccaagagacgaagaggaagcttccattgcaatgctcatcggaaatctaaacgatcactatcccatccctaacgatctcatggacctcaccactgaccttcagcaccatcaagccacgtcctcaatgacacctgaggatcacgcgtacgtgggttcatccgatgatcaggtgagctttaacgactttgagtggtggtgatatggtggtggaagttctcaagttcataacccccttatgaaaatagaccttaagatatacaaaagagattaaaagaaaaaaaagttagtatatttcatcatatctctcattgaagatgagatttatatctataattgttttatatagtgtttttattacttttctatcaatatattaaagttttaattaaaaaaaaaaaaaaaaaaa

SEQ ID NO: 963 - protein, 362 aa, Arabidopsis thaliana
MDNFLPFPSSNANSVQELSMDPNNNRSHFTTVPTYDHHQAQPHHFLPPFSYPVEQMAAVMNPQPVYLSECYPQIPVTQTGSEFGSLVGNPCLWQERGGFLDPRMTKMARINRKNAMMRSRNNSSPNSSPSELVDSKRQLMMLNLKNNVQISDKKDSYQQSTFDNKKLRVLCEKELKNSDVGSLGRIVLPKRDAEANLPKLSDKEGIVVQMRDVFSMQSWSFKYKFWSNNKSRMYVLENTGEFVKQNGAEIGDFLTIYEDESKNLYFAMNGNSGKQNEGRENESRERNHYEEAMLDYIPRDEEEASIAMLIGNLNDHYPIPNDLMDLTTDLQHHQATSSMTPEDHAYVGSSDDQVSFNDFEWW

SEQ ID NO: 964 - DNA, 582 bp, Arabidopsis thaliana
atggacatttctgcgcagagatttgccatgaacggaagaagcatgagactccctcccgggtttcggttcgatcccgatgatgaagatcttgtgttcgagtatctcgccaagaaggtcctccaccgtccaatggacttcgatctccctgagctccgttcttgcaatgttgatccatgggacttgctaggagagaagaacaaggaagtgtattacttcgtgaagaaggaagagcgagagaggaagggaagagagacgttatccggttattgggaagagtgtgaagaagaggaagtaatggaggctggtggtcgtgattgtattcatttagaaggaaggagaaagacatttgctttctttattggaaaaaaacctcgagggacaataactccatggatcatgtacgagttccgacttctttcctctagagctacaaggtggtcatcgtcccctctacctcggggtgaggtaggaaaatggagggcggtgaaagtcgtagtgaaggaagagaatgatgaagagatggtggaggatgagcacgagtctgacgagtctgatggcgaggaagttattcaaagccggtga

SEQ ID NO: 965 - protein, 193 aa, Arabidopsis thaliana
MDISAQRFAMNGRSMRLPPGFRFDPDDEDLVFEYLAKKVLHRPMDFDLPELRSCNVDPWDLLGEKNKEVYYFVKKEERERKGRETLSGYWEECEEEEVMEAGGRDCIHLEGRRKTFAFFIGKKPRGTITPWIMYEFRLLSSRATRWSSSPLPRGEVGKWRAVKVVVKEENDEEMVEDEHESDESDGEEVIQSR

SEQ ID NO: 966 - DNA, 486 bp, Arabidopsis thaliana
atgcaggcggaggagataatatgccgtgtttcagacgaagagatcatcgagaattacctgaggccaaagataaacggtgaaacatcttcaatcccgagatatgttgtggaattggcagaggagctgtacactgtagagccttggctgcttcctcgacaaacagctccaattctcaaccctggcgagtggttctactttgggaaacgcaatcgaaagtatagtaacttggaaggtgttcattgcgagggatcgtggatactcgaagacggttgcatcgcagtcctgtccaaggagacgggtgaggaaattggtggaacgacgagatttaggtattactataggaacaagggggataaagagagtcgtctgaagatgagcaattggtttatgagagagtatcgtctctattacaaatccaggagagtcttcaatggacgtcaggttttctgcattatcacttgtaatgatgaacattttatcgaataa

SEQ ID NO: 967 - protein, 161 aa, Arabidopsis thaliana
MQAEEIICRVSDEEIIENYLRPKINGETSSIPRYVVELAEELYTVEPWLLPRQTAPILNPGEWFYFGKRNRKYSNLEGVHCEGSWILEDGCIAVLSKETGEEIGGTTRFRYYYRNKGDKESRLKMSNWFMREYRLYYKSRRVFNGRQVFCIITCNDEHFIE

SEQ ID NO: 968 - DNA, 978 bp, Arabidopsis thaliana
gaattgtcaccgggaaaaatggaaaacaaaatcgcgccgtttagttacagcggaagctccgccggaaattcatccagtggcggcgtcgtttcgtcgtctctctactctgatcaactctacaagtcgactcgcaacataatgcaacagcgtcaagatatggtgaatcgcgaggcgttgtgttacacgcgtctccatgaggcttcgcttgaagcagaagcgcttcgtctagagaacactgaactccgatcgatgaatcttcgtctcaagaatgagctcaacagtctcatcagatcttcgatccagaaccgatttgatcatcgatctccgcttcggatgcttagcaatctttcgatcggaggtaatgacgccgacgaagtggagaatcagaaccgtacggttaatcgcgatgacgtcaatgataagagtccgacgagtgttatggagaatgaggatctgaatcgctcttcgcttccaaagagcatctctgtgagatctaatggctactctaaggcaagtcagggaggtggtggtgcggctgctcaaagtggaaaacctcgtggaaccgtcactaagcctgggacttgtggtcaagtcagtactacgcagaaggtgtatgtgcgaggaggagggaagaaagaagatcaggaggaagagatagaagtggaggtgtacaatcaagggatgacaaagacagagctgtgcaacaaatggcaagagacagggacatgcccatatggtgaccattgccagttcgctcacggcattaaggaactccgtccagtgatccgccatccccgttacaagactgaggtttgcagaatggttcttgctggtgataactgtccttatggtcaccgttgccacttccgccactcactatctgagcaggagaagctcgttgctgctggtttcaaacccaagtcatccctcaagctgatcacatgacctgaccctggtttcaagtcctccttcaagctg

SEQ ID NO: 969 - protein, 308 aa, Arabidopsis thaliana
MENKIAPFSYSGSSAGNSSSGGVVSSSLYSDQLYKSTRNIMQQRQDMVNREALCYTRLHEASLEAEALRLENTELRSMNLRLKNELNSLIRSSIQNRFDHRSPLRMLSNLSIGGNDADEVENQNRTVNRDDVNDKSPTSVMENEDLNRSSLPKSISVRSNGYSKASQGGGGAAAQSGKPRGTVTKPGTCGQVSTTQKVYVRGGGKKEDQEEEIEVEVYNQGMTKTELCNKWQETGTCPYGDHCQFAHGIKELRPVIRHPRYKTEVCRMVLAGDNCPYGHRCHFRHSLSEQEKLVAAGFKPKSSLKLIT

SEQ ID NO: 970 - DNA, 1365 bp, Arabidopsis thaliana
atgattccacataatcatgaccgcctctcattctctagctttgtccatgaccaagagcacatcacccctaatccttaccctaactctcagcctgcagcctccactaaaacacccaagaaaaagagaaaccttccaggaaatccagatccaaatgcagaagtcatctctctatctccaaaatccctcatggcgacaaatcggttcttttgtgaaatttgtaacaaggggtttcagagagaacagaaccttcagctccacaaaagaggccacaacctgccatggaagctgaagcagaaaacgaacaagaatcaggtgaagaagaaagtttatatatgccctgagaagagttgcgtccatcatgatccagctcgagccctaggagaccttactggaataaagaagcactttagcaggaaacatggagagaagaagtggaaatgcgataagtgttccaagaagtatgctgtgatatccgattggaaagctcataacaagatttgtggtagcagagagtttagatgtgattgtggtactcttttctccaggaaggacagtttcatctcacatagatccttctgtgatgtcttagctgaagaaagttctaaattcttctcagttccttcaccattagccgccaattcgaccatcgccactgtcactgataccaacaatccaattctcattcaatcacaattggatcaatcttccacaggtacggccgatcttaacgtcaacaacaatcacaccaccctatttggacaaaagttcaccaactccaacccaacccaacaacaacccaatgctttggcgttgtcctcaccaccatcacctcgtagtacatctgattcggttcataatctatggaagttacaagaagaggaatgtgcacaccagtggttactcaatgaatatatgaacaataacaaaaacatattccataagggaatattcaagaatcaagaagatgagataaagaagggaaatatctacagcggctcaaacccaaccgatggaaacatagcatccttgttctcgtataatcaagaagcagtgaatatggcttcattttcggcaacaacattgcttcaaaaggtagctcaaacgggaacaccatcaagctccgaaactagcaccaccatgtttgggcaaatgacttcctccatcttcaacaatacgatgctaaactcctattgtttaacggcgaagaataatgaagaagagttgaccagagactttcttggtgtgggaagtagtgaggaccaacaacgtctacatcgtcatcgcttcccatcaagcgtgccattgacggcgaaccatgatattcccaagttggccgcaaccattgtaggcaggaagcaaccatag

SEQ ID NO: 971 - protein, 454 aa, Arabidopsis thaliana
MIPHNHDRLSFSSFVHDQEHITPNPYPNSQPAASTKTPKKKRNLPGNPDPNAEVISLSPKSLMATNRFFCEICNKGFQREQNLQLHKRGHNLPWKLKQKTNKNQVKKKVYICPEKSCVHHDPARALGDLTGIKKHFSRKHGEKKWKCDKCSKKYAVISDWKAHNKICGSREFRCDCGTLFSRKDSFISHRSFCDVLAEESSKFFSVPSPLAANSTIATVTDTNNPILIQSQLDQSSTGTADLNVNNNHTTLFGQKFTNSNPTQQQPNALALSSPPSPRSTSDSVHNLWKLQEEECAHQWLLNEYMNNNKNIFHKGIFKNQEDEIKKGNIYSGSNPTDGNIASLFSYNQEAVNMASFSATTLLQKVAQTGTPSSSETSTTMFGQMTSSIFNNTMLNSYCLTAKNNEEELTRDFLGVGSSEDQQRLHRHRFPSSVPLTANHDIPKLAATIVGRKQP

SEQ ID NO: 972 - DNA, 1014 bp, Arabidopsis thaliana
atgtctaatccagcttgttcgaatctcttcaacaatggatgtgaccataatagcttcaactattccacttctctctcttacatttacaactctcacggtagctactattactctaataccacaaaccctaattacattaatcatactcataccacttccacttcccctaactcacccccactaagagaagctcttcctcttcttagcttaagccccataaggcaccaagaacaacaagaccaacactatttcatggacacccatcaaattagctcttcaaactttcttgatgatcctcttgtgactgtggatcttcatctagggttaccaaactacggtgttggtgagagcattaggagcaatattgctcctgatgcaaccacggacgagcaagatcaagatcatgaccgaggagtagaagtcacagttgagtcccaccttgatgatgatgatgatcatcatggagatctacacagaggtcatcactattggattcctactccttctcagattttgattggtcctacacagttcacttgtcctctttgcttcaagacattcaacagatacaacaacatgcagatgcacatgtggggacacggctcacaatacagaaagggaccagaatccttaagaggaacccaaccaacaggaatgctaagactaccatgtttctgctgtgcacccggttgcaagaacaacattgaccacccacgagccaagcctcttaaggactttcgaaccctccaaacacattacaaacgtaaacatgggtctaaaccatttgcttgtcgtatgtgtggtaaggcctttgcagtgaaaggagattggagaacgcatgagaagaattgtggaaagctttggtattgctcttgtggctcggattttaagcacaagaggtcgcttaaggaccatgtcaaggcctttggaaatggtcatgttccttgtgggattgatagttttggaggagatcatgaggactactatgatgctgcttctgatatcgagcaataa

SEQ ID NO: 973 - protein, 337 aa, Arabidopsis thaliana
MSNPACSNLFNNGCDHNSFNYSTSLSYIYNSHGSYYYSNTTNPNYINHTHTTSTSPNSPPLREALPLLSLSPIRHQEQQDQHYFMDTHQISSSNFLDDPLVTVDLHLGLPNYGVGESIRSNIAPDATTDEQDQDHDRGVEVTVESHLDDDDDHHGDLHRGHHYWIPTPSQILIGPTQFTCPLCFKTFNRYNNMQMHMWGHGSQYRKGPESLRGTQPTGMLRLPCFCCAPGCKNNIDHPRAKPLKDFRTLQTHYKRKHGSKPFACRMCGKAFAVKGDWRTHEKNCGKLWYCSCGSDFKHKRSLKDHVKAFGNGHVPCGIDSFGGDHEDYYDAASDIEQ

What is claimed is:

1. A method for producing a plant that has greater biotic resistance or abiotic stress tolerance than a first control plant, and fewer or reduced adverse morphological or developmental effects than a second control plant, the method steps comprising:
(a) providing a two component expression system comprising:
(i) a target nucleic acid construct that encodes a transcription factor polypeptide; and
(ii) an activator nucleic acid construct encoding a steroid-binding domain of a glucocorticoid receptor;
(b) introducing the two component expression system into a target plant;
(c) selecting transgenic plant lines homozygous for the target nucleic acid construct and the activator nucleic acid construct;
(c) mutagenizing the transgenic plant lines to produce a pool of mutagenized transgenic plant lines comprising sequence variants of the transcription factor polypeptide; and
(d) selecting one or more of the mutagenized transgenic plant lines that have:
(i) greater biotic resistance or abiotic stress tolerance than the first control plant, wherein the first control plant does not overexpress the transcription factor polypeptide; and
(ii) fewer or reduced adverse morphological or developmental effects as compared to the second control plant, wherein the second control plant constitutively overexpresses the transcription factor polypeptide.

2. The method of claim 1, wherein the target nucleic acid construct comprises a LexA operator that regulates expression of the transcription factor polypeptide; and
the activator nucleic acid construct comprises a LexA DNA binding domain fused to a GAL4 activation domain and the steroid-binding domain of the glucocorticoid receptor.

3. The method of claim 1, wherein the biotic stress resistance is tolerance to a fungal plant disease.

4. The method of claim 3, wherein the fungal plant disease is caused by a biotrophic or necrotrophic pathogen.

5. The method of claim 3, wherein the fungal plant disease is caused by Botrytis, Erysiphe, or Sclerotinia.

6. The method of claim 1, wherein the transcription factor polypeptide is a homolog of SEQ ID NO: 4 that comprises a conserved AP2 domain having at least 80% amino acid sequence identity to a conserved AP2 domain of amino acids 102-166 of SEQ ID NO: 4.

7. The method of claim 6, wherein the conserved AP2 domain has at least 84% amino acid sequence identity to a conserved AP2 domain of amino acids 16-80 of SEQ ID NO: 2.

8. The method of claim 1, wherein the transcription factor polypeptide comprises SEQ ID NO: 4.

9. The method of claim 1, wherein the transcription factor polypeptide is a homolog of SEQ ID NO: 2 that comprises a conserved AP2 domain that has at least 76% amino acid sequence identity to a conserved AP2 domain of amino acids 16-80 of SEQ ID NO: 2.

10. The method of claim 9, wherein the conserved AP2 domain has at least 84% amino acid sequence identity to a conserved AP2 domain of amino acids 16-80 of SEQ ID NO: 2.

11. The method of claim 9, wherein the conserved AP2 domain has at least 93% amino acid sequence identity to a conserved AP2 domain of amino acids 16-80 of SEQ ID NO: 2.

12. The method of claim 1, wherein the one or more of the mutagenized transgenic plant lines produces greater yield than the first control plant.

13. The method of claim 1, wherein the target plant is generated by introducing the activator nucleic acid construct into a first plant, a second plant is selected that is homozygous for the activator nucleic acid construct, the second plant is transformed with the target nucleic acid construct to generate a third plant, and a fourth plant is selected that is homozygous for both the activator and target nucleic acid constructs.

14. The method of claim 1, wherein the transcription factor polypeptide comprises any of SEQ ID NOs: 2, 4, 12, 14, 16, 18, 20, 22, 24, 26, 28, 30, 32, 34, 36, 38 or 40, or 41-72, or 74, 76, 78, 80, 82, 84, 86, 88, 90, 92, 94, or 96, or any of SEQ ID NO: 2n−1, where n=56-487.

15. A transgenic plant produced according to the method of claim 1;
wherein the transgenic plant comprises and is homozygous for the target nucleic acid construct and the activator nucleic acid construct; and
wherein the transgenic plant has greater biotic resistance or abiotic stress tolerance than the first control plant of claim 1, and fewer or reduced adverse morphological or developmental effects than a second control plant of claim 1.

16. A transgenic seed produced by the transgenic plant of claim 15, wherein the transgenic seed comprises and is homozygous for the target nucleic acid construct and the activator nucleic acid construct.
